(19) United States
(12) Patent Application Publication
(10) Pub. No.: US 2016/0138037 A1
(43) Pub. Date: May 19, 2016

(54) PLANTS HAVING ONE OR MORE ENHANCED YIELD-RELATED TRAITS AND A METHOD FOR MAKING THE SAME

(71) Applicant: BASF PLANT SCIENCE COMPANY, Ludwigshafen (DE)

(72) Inventors: Christophe REUZEAU, La Chapelle Gonauet (FR); Su-May YU, Taipei (TW); Yue-Le HSING, Taipei (TW); Tuan-Hua David HO, Chesterfield, MO (US); Shuen-Fang LO, Taichung (TW)

(73) Assignee: BASF Plant Science Compnay GmbH, Ludwigshafen (DE)

(21) Appl. No.: 14/899,403

(22) PCT Filed: Jun. 6, 2014
(86) PCT No.: PCT/IB2014/062004

§ 371 Date: Dec. 17, 2015

Related U.S. Application Data
(60) Provisional application No. 61/835,663, filed on Jun. 17, 2013.

(51) Int. Cl. C12N 15/82; C12N 9/18

(52) U.S. Cl. CPC C12N 15/8261; C12N 9/18; C12Y 301/01006

(57) ABSTRACT

A method for enhancing one or more yield-related traits in plants relative to control plants comprises modulating expression in a plant of a nucleic acid encoding a PAE1 (pectin acetylesterase) polypeptide. PAE1-encoding nucleic acids, and constructs comprising the same, are used in performing the method, and plants having one or more enhanced yield-related traits are obtained.

### BACKGROUND

[0001] The present invention relates generally to the field of molecular biology and concerns a method for enhancing one or more yield-related traits in plants by modulating expression, preferably increasing expression, in a plant of a nucleic acid encoding a pectin acetylesterase (PAE1) polypeptide. The present invention also concerns plants having modulated expression, preferably increased expression, of a nucleic acid encoding a PAE1 polypeptide, which plants have one or more enhanced yield-related traits relative to corresponding wild type plants or other control plants. The invention also provides constructs and sequences useful in the methods of the invention.

[0002] The ever-increasing world population and the dwindling supply of arable land available for agriculture fuels research towards increasing the efficiency of agriculture. Conventional means for crop and horticultural improvements utilise selective breeding techniques to identify plants having desirable characteristics. However, such selective breeding techniques have several drawbacks, namely that these techniques are typically labour intensive and result in plants that often contain heterogeneous genetic components that may not always result in the desirable trait being passed on from parent plants. Advances in molecular biology have allowed mankind to modify the germplasm of animals and plants. Genetic engineering of plants entails the isolation and manipulation of genetic material (typically in the form of DNA or RNA) and the subsequent introduction of that genetic material into a plant. Such technology has the capacity to deliver crops or plants having various improved economic, agronomic or horticultural traits.

[0003] A trait of particular economic interest is increased yield. Yield is normally defined as the measurable produce of economic value from a crop. This may be defined in terms of quantity and/or quality. Yield is directly dependent on several factors, for example, the number and size of the organs, plant architecture (for example, the number of branches), seed production, leaf senescence and more. Root development, nutrient uptake, stress tolerance and early vigour may also be important factors in determining yield. Optimizing the abovementioned factors may therefore contribute to increasing crop yield.

[0004] Seed yield is a particularly important trait, since the seeds of many plants are important for human and animal nutrition. Crops such as corn, rice, wheat, canola and soybean account for over half the total human caloric intake, whether through direct consumption of the seeds themselves or through consumption of meat products raised on processed seeds. They are also a source of sugars, oils and many kinds of metabolites used in industrial processes. Seeds contain an embryo (the source of new shoots and roots) and an endosperm (the source of nutrients for embryo growth during germination and during early growth of seedlings). The development of a seed involves many genes, and requires the transfer of metabolites from the roots, leaves and stems into the growing seed. The endosperm, in particular, assimilates the metabolic precursors of carbohydrates, oils and proteins and synthesizes them into storage macromolecules to fill out the grain.

[0005] Another important trait for many crops is early vigour. Improving early vigour is an important objective of modern rice breeding programs in both temperate and tropical rice cultivars. Long roots are important for proper soil anchorage in water-seeded rice. Where rice is sown directly into flooded fields, and where plants must emerge rapidly through water, longer shoots are associated with vigour. Where drill-seeding is practiced, longer mesocotyls and coleoptiles are important for good seedling emergence. The ability to engineer early vigour into plants would be of great importance in agriculture. For example, poor early vigour has been a limitation to the introduction of maize (Zea mays L.) hybrids based on Corn Belt germplasm in the European Atlantic.

[0006] Crop yield may therefore be increased by optimising one of the above-mentioned factors.

[0007] Depending on the end use, the modification of certain yield traits may be favoured over others. For example for applications such as forage or wood production, or bio-fuel resource, an increase in the vegetative parts of a plant may be desirable, and for applications such as flour, starch or oil production, an increase in seed parameters may be particularly desirable. Even amongst the seed parameters, some may be favoured over others, depending on the application. Various mechanisms may contribute to increasing seed yield, whether that is in the form of increased seed size or increased seed number.

[0008] It has now been found that various yield-related traits may be improved in plants by modulating expression in a plant of a nucleic acid encoding a PAE1 polypeptide in a plant.

### DEFINITIONS

[0009] The following definitions will be used throughout the present application. The section captions and headings in this application are for convenience and reference purpose only and should not affect in any way the meaning or interpretation of this application. The technical terms and expressions used within the scope of this application are generally to be given the meaning commonly applied to them in the pertinent art of plant biology, molecular biology, bioinformatics and plant breeding. All of the following term definitions apply to the complete content of this application. It is to be understood that as used in the specification and in the claims, “a” or “an” can mean one or more, depending upon the context in which it is used. Thus, for example, reference to “a cell” can mean that at least one cell can be utilized. The term “essentially”, “about”, “approximately” and the like in connection with an attribute or a value, particularly also define exactly the attribute or exactly the value, respectively. The term “about” in the context of a given numeric value or range relates in particular to a value or range that is within 20%, within 10%, or within 5% of the value or range given. As used herein, the term “comprising” also encompasses the term “consisting of”.

### Peptide(s)/Protein(s)

[0010] The terms “peptides”, “oligopeptides”, “polypeptide” and “protein” are used interchangeably herein and refer to amino acids in a polymeric form of any length, linked together by peptide bonds, unless mentioned herein otherwise.

### Polynucleotide(s)/Nucleic Acid(s)/Nucleic Acid Sequence(s)/Nucleotide Sequence(s)

[0011] The terms “polynucleotide(s)”, “nucleic acid sequence(s)”, “nucleotide sequence(s)”, “nucleic acid(s)”, “nucleic acid molecule” are used interchangeably herein and refer to nucleotides, either ribonucleotides or deoxyribonucleotides or a combination of both, in a polymeric unbranched form of any length.

### Homologue(s)

[0012] “Homologues” of a protein encompass peptides, oligopeptides, polypeptides, proteins and enzymes having amino acid substitutions, deletions and/or insertions relative to the unmodified protein in question and having substantially the same biological and functional activity as the unmodified protein from which they are derived.

[0013] “Homologues” of a gene encompass nucleic acid sequences with nucleotide substitutions, deletions and/or insertions relative to the unmodified gene in question and having similar biological and functional properties as the unmodified gene from which they are derived, or encoding polypeptides having substantially the same biological and functional activity as the polypeptide encoded by the unmodified nucleic acid sequence

[0014] Orthologues and paralogues are two different forms of homologues and encompass evolutionary concepts used to describe the ancestral relationships of genes. Paralogues are genes within the same species that have originated through duplication of an ancestral gene; orthologues are genes from different organisms that have originated through speciation, and are also derived from a common ancestral gene.

[0015] A “deletion” refers to removal of one or more amino acids from a protein.

[0016] An “insertion” refers to one or more amino acid residues being introduced into a predetermined site in a protein. Insertions may comprise N-terminal and/or C-terminal fusions as well as intra-sequence insertions of single or multiple amino acids. Generally, insertions within the amino acid sequence will be smaller than N- or C-terminal fusions, of the order of about 1 to 10 residues. Examples of N- or C-terminal fusion proteins or peptides include the binding domain or activation domain of a transcriptional activator as used in the yeast two-hybrid system, phage coat proteins, (histidine)-6-tag, glutathione S-transferase-tag, protein A, maltose-binding protein, dihydrofolate reductase, Tag·100 epitope, c-myc epitope, FLAG®-epitope, lacZ, CMP (calmodulin-binding peptide), HA epitope, protein C epitope and VSV epitope.

[0017] A “substitution” refers to replacement of amino acids of the protein with other amino acids having similar properties (such as similar hydrophobicity, hydrophilicity, antigenicity, propensity to form or break α-helical structures or β-sheet structures). Amino acid substitutions are typically of single residues, but may be clustered depending upon functional constraints placed upon the polypeptide and may range from 1 to 10 amino acids. The amino acid substitutions are preferably conservative amino acid substitutions. Conservative substitution tables are well known in the art (see for example Creighton (1984) Proteins. W.H. Freeman and Company (Eds) and Table 1 below).

TABLE 1
Examples of conserved amino acid substitutions

| | Conservative |
|---|---|
| Residue | Substitutions |
| Ala | Ser |
| Arg | Lys |
| Asn | Gln; His |
| Asp | Glu |
| Gln | Asn |
| Cys | Ser |
| Glu | Asp |
| Gly | Pro |
| His | Asn; Gln |
| Ile | Leu, Val |
| Leu | Ile; Val |
| Lys | Arg; Gln |
| Met | Leu; Ile |
| Phe | Met; Leu; Tyr |
| Ser | Thr; Gly |
| Thr | Ser; Val |
| Trp | Tyr |
| Tyr | Trp; Phe |
| Val | Ile; Leu |

[0018] Amino acid substitutions, deletions and/or insertions may readily be made using peptide synthetic techniques known in the art, such as solid phase peptide synthesis and the like, or by recombinant DNA manipulation. Methods for the manipulation of DNA sequences to produce substitution, insertion or deletion variants of a protein are well known in the art. For example, techniques for making substitution mutations at predetermined sites in DNA are well known to those skilled in the art and include M13 mutagenesis, T7-Gen in vitro mutagenesis (USB, Cleveland, Ohio), QuickChange Site Directed mutagenesis (Stratagene, San Diego, Calif.), PCR-mediated site-directed mutagenesis or other site-directed mutagenesis protocols (see Current Protocols in Molecular Biology, John Wiley & Sons, N.Y. (1989 and yearly updates)).

### Derivatives

[0019] “Derivatives” include peptides, oligopeptides, polypeptides which may, compared to the amino acid sequence of the naturally-occurring form of the protein, such as the protein of interest, comprise substitutions of amino acids with non-naturally occurring amino acid residues, or additions of non-naturally occurring amino acid residues. “Derivatives” of a protein also encompass peptides, oligopeptides, polypeptides which comprise naturally occurring altered (glycosylated, acylated, prenylated, phosphorylated, myristoylated, sulphated etc.) or non-naturally altered amino acid residues compared to the amino acid sequence of a naturally-occurring form of the polypeptide. A derivative may also comprise one or more non-amino acid substituents or additions compared to the amino acid sequence from which it is derived, for example a reporter molecule or other ligand, covalently or non-covalently bound to the amino acid sequence, such as a reporter molecule which is bound to facilitate its detection, and non-naturally occurring amino acid residues relative to the amino acid sequence of a naturally-occurring protein. Furthermore, “derivatives” also include fusions of the naturally-occurring form of the protein with tagging peptides such as FLAG, HIS6 or thioredoxin (for a review of tagging peptides, see Terpe, Appl. Microbiol. Biotechnol. 60, 523-533, 2003).

[0020] “Derivatives” of nucleic acids include nucleic acids which may, compared to the nucleotide sequence of the naturally-occurring form of the nucleic acid comprise deletions, alterations, or additions with non-naturally occurring nucleotides.

### Functional Fragments

[0021] The term “functional fragment” refers to any nucleic acid or protein which represents merely a part of the full length nucleic acid or full length protein, respectively, but still provides substantially the same function when overexpressed or repressed in a plant respectively, or still has the same biological activity of the full length nucleic acid or full length protein. In cases where overexpression of nucleic acid is desired, the term “substantially the same functional activity” or “substantially the same function” means that any homologue and/or fragment provide increased/enhanced yield-related trait(s) when expressed in a plant. Preferably substantially the same functional activity or substantially the same function means at least 50%, at least 60%, at least 70%, at least 80%, at least 90%, at least 95%, at least 98%, at least 99% or 100% or higher increased/enhanced yield-related trait(s) compared with the functional activity provided by the exogenous expression of the full-length POI encoding nucleotide sequence or the POI amino acid sequence.

### Domain, Motif/Consensus Sequence/Signature

[0022] The term “domain” refers to a set of amino acids conserved at specific positions along an alignment of sequences of evolutionarily related proteins. While amino acids at other positions can vary between homologues, amino acids that are highly conserved at specific positions indicate amino acids that are likely essential in the structure, stability or function of a protein. Identified by their high degree of conservation in aligned sequences of a family of protein homologues, they can be used as identifiers to determine if any polypeptide in question belongs to a previously identified polypeptide family.

[0023] The term “motif” or “consensus sequence” or “signature” refers to a short conserved region in the sequence of evolutionarily related proteins. Motifs are frequently highly conserved parts of domains, but may also include only part of the domain, or be located outside of conserved domain (if all of the amino acids of the motif fall outside of a defined domain).

[0024] Specialist databases exist for the identification of domains, for example, SMART (Schultz et al. (1998) Proc. Natl. Acad. Sci. USA 95, 5857-5864; Letunic et al. (2002) Nucleic Acids Res 30, 242-244), InterPro (Mulder et al., (2003) Nucl. Acids. Res. 31, 315-318), Prosite (Bucher and Bairoch (1994), A generalized profile syntax for biomolecular sequences motifs and its function in automatic sequence interpretation. (In) ISMB-94; Proceedings 2nd International Conference on Intelligent Systems for Molecular Biology. Altman R., Brutlag D., Karp P., Lathrop R., Searls D., Eds., pp53-61, AAAI Press, Menlo Park; Hulo et al., Nucl. Acids. Res. 32:D134-D137, (2004)), or Pfam (Bateman et al., Nucleic Acids Research 30(1): 276-280 (2002)) & The Pfam protein families database: R. D. Finn, J. Mistry, J. Tate, P. Coggill, A. Heger, J. E. Pollington, O. L. Gavin, P. Gunesekaran, G. Ceric, K. Forslund, L. Holm, E. L. Sonnhammer, S. R. Eddy, A. Bateman Nucleic Acids Research (2010) Database Issue 38:211-222). A set of tools for in silico analysis of protein sequences is available on the ExPASy proteomics server (Swiss Institute of Bioinformatics (Gasteiger et al., ExPASy: the proteomics server for in-depth protein knowledge and analysis, Nucleic Acids Res. 31:3784-3788(2003)). Domains or motifs may also be identified using routine techniques, such as by sequence alignment.

[0025] Methods for the alignment of sequences for comparison are well known in the art, such methods include GAP, BESTFIT, BLAST, FASTA and TFASTA. GAP uses the algorithm of Needleman and Wunsch ((1970) J Mol Biol 48: 443-453) to find the global (i.e. spanning the complete sequences) alignment of two sequences that maximizes the number of matches and minimizes the number of gaps. The BLAST algorithm (Altschul et al. (1990) J Mol Biol 215: 403-10) calculates percent sequence identity and performs a statistical analysis of the similarity between the two sequences. The software for performing BLAST analysis is publicly available through the National Centre for Biotechnology Information (NCBI). Homologues may readily be identified using, for example, the ClustalW multiple sequence alignment algorithm (version 1.83), with the default pairwise alignment parameters, and a scoring method in percentage. Global percentages of similarity and identity may also be determined using one of the methods available in the MatGAT software package (Campanella et al., BMC Bioinformatics. 2003 Jul. 10; 4:29. MatGAT: an application that generates similarity/identity matrices using protein or DNA sequences.). Minor manual editing may be performed to optimise alignment between conserved motifs, as would be apparent to a person skilled in the art. Furthermore, instead of using full-length sequences for the identification of homologues, specific domains may also be used. The sequence identity values may be determined over the entire nucleic acid or amino acid sequence or over selected domains or conserved motif(s), using the programs mentioned above using the default parameters. For local alignments, the Smith-Waterman algorithm is particularly useful (Smith T F, Waterman M S (1981) J. Mol. Biol 147(1); 195-7).

### Reciprocal BLAST

[0026] Typically, this involves a first BLAST involving BLASTing a query sequence (for example using any of the sequences listed in Table A of the Examples section) against any sequence database, such as the publicly available NCBI database. BLASTN or TBLASTX (using standard default values) are generally used when starting from a nucleotide sequence, and BLASTP or TBLASTN (using standard default values) when starting from a protein sequence. The BLAST results may optionally be filtered. The full-length sequences of either the filtered results or non-filtered results are then BLASTed back (second BLAST) against sequences from the organism from which the query sequence is derived. The results of the first and second BLASTs are then compared. A paralogue is identified if a high-ranking hit from the first blast is from the same species as from which the query sequence is derived, a BLAST back then ideally results in the query sequence amongst the highest hits; an orthologue is identified if a high-ranking hit in the first BLAST is not from the same species as from which the query sequence is derived, and preferably results upon BLAST back in the query sequence being among the highest hits.

[0027] High-ranking hits are those having a low E-value. The lower the E-value, the more significant the score (or in other words the lower the chance that the hit was found by chance). Computation of the E-value is well known in the art. In addition to E-values, comparisons are also scored by percentage identity. Percentage identity refers to the number of identical nucleotides (or amino acids) between the two compared nucleic acid (or polypeptide) sequences over a particular length. In the case of large families, ClustalW may be used, followed by a neighbour joining tree, to help visualize clustering of related genes and to identify orthologues and paralogues.

### Transit Peptide

[0028] A “transit peptide” (transit signal, signal peptide, signal sequence) is a short (3-60 amino acids long) sequence that directs the transport of a protein, preferably to organelles within the cell or to certain subcellular locations or for the secretion of a protein.

### Hybridisation

[0029] The term “hybridisation” as defined herein is a process wherein substantially homologous complementary nucleotide sequences anneal to each other. The hybridisation process can occur entirely in solution, i.e. both complementary nucleic acids are in solution. The hybridisation process can also occur with one of the complementary nucleic acids immobilised to a matrix such as magnetic beads, Sepharose beads or any other resin. The hybridisation process can furthermore occur with one of the complementary nucleic acids immobilised to a solid support such as a nitro-cellulose or nylon membrane or immobilised by e.g. photolithography to, for example, a siliceous glass support (the latter known as nucleic acid arrays or microarrays or as nucleic acid chips). In order to allow hybridisation to occur, the nucleic acid molecules are generally thermally or chemically denatured to melt a double strand into two single strands and/or to remove hairpins or other secondary structures from single stranded nucleic acids.

[0030] The term “stringency” refers to the conditions under which a hybridisation takes place. The stringency of hybridisation is influenced by conditions such as temperature, salt concentration, ionic strength and hybridisation buffer composition. Generally, low stringency conditions are selected to be about 30° C. lower than the thermal melting Point (Tₘ) for the specific sequence at a defined ionic strength and pH. Medium stringency conditions are when the temperature is 20° C. below Tₘ, and high stringency conditions are when the temperature is 10° C. below Tₘ. High stringency hybridisation conditions are typically used for isolating hybridising sequences that have high sequence similarity to the target nucleic acid sequence. However, nucleic acids may deviate in sequence and still encode a substantially identical polypeptide, due to the degeneracy of the genetic code. Therefore medium stringency hybridisation conditions may sometimes be needed to identify such nucleic acid molecules.

[0031] The Tₘ is the temperature under defined ionic strength and pH, at which 50% of the target sequence hybridises to a perfectly matched probe. The Tₘ is dependent upon the solution conditions and the base composition and length of the probe. For example, longer sequences hybridise specifically at higher temperatures. The maximum rate of hybridisation is obtained from about 16° C. up to 32° C. below Tₘ. The presence of monovalent cations in the hybridisation solution reduce the electrostatic repulsion between the two nucleic acid strands thereby promoting hybrid formation; this effect is visible for sodium concentrations of up to 0.4M (for higher concentrations, this effect may be ignored). Formamide reduces the melting temperature of DNA-DNA and DNA-RNA duplexes with 0.6 to 0.7° C. for each percent formamide, and addition of 50% formamide allows hybridisation to be performed at 30 to 45° C., though the rate of hybridisation will be lowered. Base pair mismatches reduce the hybridisation rate and the thermal stability of the duplexes. On average and for large probes, the Tm decreases about 1° C. per % base mismatch. The Tₘ may be calculated using the following equations, depending on the types of hybrids:

[0032] 1) DNA-DNA hybrids (Meinkoth and Wahl, Anal. Biochem., 138: 267-284, 1984):

Tₘ=81.5° C.+16.6×log₁₀[Na⁺]^{a}+0.41×%[G/C^{b}]−500×[L^{c}]⁻¹−0.61×% formamide

[0033] 2) DNA-RNA or RNA-RNA hybrids:

Tₘ=79.8° C.+18.5(log₁₀[Na⁺]^{a})+0.58(% G/C^{b})+11.8(% G/C^{b})²−820/L^{c}

[0034] 3) oligo-DNA or oligo-RNA^{d} hybrids:

For <20 nucleotides: Tₘ=2(Iₙ)

For 20-35 nucleotides: Tₘ=22+1.46(Iₙ)
[0035] ^{a} or for other monovalent cation, but only accurate in the 0.01-0.4 M range.
[0036] ^{b} only accurate for % GC in the 30% to 75% range.
[0037] ^{c} L=length of duplex in base pairs.
[0038] ^{d} oligo, oligonucleotide; Iₙ,=effective length of primer=2×(no. of G/C)+(no. of A/T).

[0039] Non-specific binding may be controlled using any one of a number of known techniques such as, for example, blocking the membrane with protein containing solutions, additions of heterologous RNA, DNA, and SDS to the hybridisation buffer, and treatment with Rnase. For non-homologous probes, a series of hybridizations may be performed by varying one of (i) progressively lowering the annealing temperature (for example from 68° C. to 42° C.) or (ii) progressively lowering the formamide concentration (for example from 50% to 0%). The skilled artisan is aware of various parameters which may be altered during hybridisation and which will either maintain or change the stringency conditions.

[0040] Besides the hybridisation conditions, specificity of hybridisation typically also depends on the function of post-hybridisation washes. To remove background resulting from non-specific hybridisation, samples are washed with dilute salt solutions. Critical factors of such washes include the ionic strength and temperature of the final wash solution: the lower the salt concentration and the higher the wash temperature, the higher the stringency of the wash. Wash conditions are typically performed at or below hybridisation stringency. A positive hybridisation gives a signal that is at least twice of that of the background. Generally, suitable stringent conditions for nucleic acid hybridisation assays or gene amplification detection procedures are as set forth above. More or less stringent conditions may also be selected. The skilled artisan is aware of various parameters which may be altered during washing and which will either maintain or change the stringency conditions.

[0041] For example, typical high stringency hybridisation conditions for DNA hybrids longer than 50 nucleotides encompass hybridisation at 65° C. in 1×SSC or at 42° C. in 1×SSC and 50% formamide, followed by washing at 65° C. in 0.3×SSC. Examples of medium stringency hybridisation conditions for DNA hybrids longer than 50 nucleotides encompass hybridisation at 50° C. in 4×SSC or at 40° C. in 6×SSC and 50% formamide, followed by washing at 50° C. in 2×SSC. The length of the hybrid is the anticipated length for the hybridising nucleic acid. When nucleic acids of known sequence are hybridised, the hybrid length may be determined by aligning the sequences and identifying the conserved regions described herein. 1×SSC is 0.15M NaCl and 15 mM sodium citrate; the hybridisation solution and wash solutions may additionally include 5×Denhardt's reagent, 0.5-1.0% SDS, 100 μg/ml denatured, fragmented salmon sperm DNA, 0.5% sodium pyrophosphate. In a preferred embodiment high stringency conditions mean hybridisation at 65° C. in 0.1×SSC comprising 0.1 SDS and optionally 5×Denhardt's reagent, 100 μg/ml denatured, fragmented salmon sperm DNA, 0.5% sodium pyrophosphate, followed by the washing at 65° C. in 0.3×SSC.

[0042] For the purposes of defining the level of stringency, reference can be made to Sambrook et al. (2001) Molecular Cloning: a laboratory manual, 3^{rd} Edition, Cold Spring Harbor Laboratory Press, CSH, New York or to Current Protocols in Molecular Biology, John Wiley & Sons, N.Y. (1989 and yearly updates).

### Splice Variant

[0043] The term “splice variant” as used herein encompasses variants of a nucleic acid sequence in which selected introns and/or exons have been excised, replaced, displaced or added, or in which introns have been shortened or lengthened. Such variants will be ones in which the biological activity of the protein is substantially retained; this may be achieved by selectively retaining functional segments of the protein. Such splice variants may be found in nature or may be manmade. Methods for predicting and isolating such splice variants are well known in the art (see for example Foissac and Schiex (2005) BMC Bioinformatics 6: 25).

### Allelic Variant

[0044] “Alleles” or “allelic variants” are alternative forms of a given gene, located at the same chromosomal position. Allelic variants encompass Single Nucleotide Polymorphisms (SNPs), as well as Small Insertion/Deletion Polymorphisms (INDELs). The size of INDELs is usually less than 100 bp. SNPs and INDELs form the largest set of sequence variants in naturally occurring polymorphic strains of most organisms.

### Endogenous

[0045] Reference herein to an “endogenous” nucleic acid and/or protein refers to the nucleic acid and/or protein in question as found in a plant in its natural form (i.e., without there being any human intervention like recombinant DNA engineering), but also refers to that same gene (or a substantially homologous nucleic acid/gene) in an isolated form subsequently (re)introduced into a plant (a transgene). For example, a transgenic plant containing such a transgene may encounter a substantial reduction of the transgene expression and/or substantial reduction of expression of the endogenous gene. The isolated gene may be isolated from an organism or may be manmade, for example by chemical synthesis.

### Exogenous

[0046] The term “exogenous” (in contrast to “endogenous”) nucleic acid or gene refers to a nucleic acid that has been introduced in a plant by means of recombinant DNA technology. An “exogenous” nucleic acid can either not occur in the plant in its natural form, be different from the nucleic acid in question as found in the plant in its natural form, or can be identical to a nucleic acid found in the plant in its natural form, but not integrated within its natural genetic environment. The corresponding meaning of “exogenous” is applied in the context of protein expression. For example, a transgenic plant containing a transgene, i.e., an exogenous nucleic acid, may, when compared to the expression of the endogenous gene, encounter a substantial increase of the expression of the respective gene or protein in total. A transgenic plant according to the present invention includes an exogenous POI nucleic acid integrated at any genetic loci and optionally the plant may also include the endogenous gene within the natural genetic background.

### Gene Shuffling/Directed Evolution

[0047] “Gene shuffling” or “directed evolution” consists of iterations of DNA shuffling followed by appropriate screening and/or selection to generate variants of nucleic acids or portions thereof encoding proteins having a modified biological activity (Castle et al., (2004) Science 304(5674): 1151-4; U.S. Pat. Nos. 5,811,238 and 6,395,547).

### Expression Cassette

[0048] “Expression cassette” as used herein is DNA capable of being expressed in a host cell or in an in-vitro expression system. Preferably the DNA, part of the DNA or the arrangement of the genetic elements forming the expression cassette is artificial. The skilled artisan is well aware of the genetic elements that must be present in the expression cassette in order to be successfully expressed. The expression cassette comprises a sequence of interest to be expressed operably linked to one or more control sequences (at least to a promoter) as described herein. Additional regulatory elements may include transcriptional as well as translational enhancers, one or more NEENA as described herein, and/or one or more RENA as described herein. Those skilled in the art will be aware of terminator and enhancer sequences that may be suitable for use in performing the invention. An intron sequence may also be added to the 5′ untranslated region (UTR) or in the coding sequence to increase the amount of the mature message that accumulates in the cytosol, as described in the definitions section for increased expression/overexpression. Other control sequences (besides promoter, enhancer, silencer, intron sequences, 3′UTR and/or 5′UTR regions) may be protein and/or RNA stabilizing elements. Such sequences would be known or may readily be obtained by a person skilled in the art.

[0049] The expression cassette may be integrated into the genome of a host cell and replicated together with the genome of said host cell.

### Construct/Genetic Construct

[0050] Artificial DNA (such as but, not limited to plasmids or viral DNA) capable of replication in a host cell and used for introduction of a DNA sequence of interest into a host cell or host organism. Host cells of the invention may be any cell selected from bacterial cells, such as Escherichia coli or Agrobacterium species cells, yeast cells, fungal, algal or cyanobacterial cells or plant cells. The skilled artisan is well aware of the genetic elements that must be present on the genetic construct in order to successfully transform, select and propagate host cells containing the sequence of interest. The sequence(s) of interest is/are operably linked to one or more control sequences (at least to a promoter) as described herein. Additional regulatory elements may include transcriptional as well as translational enhancers. Those skilled in the art will be aware of terminator and enhancer sequences that may be suitable for use in performing the invention. An intron sequence may also be added to the 5′ untranslated region (UTR) or in the coding sequence to increase the amount of the mature message that accumulates in the cytosol, as described in the definitions section. Other control sequences (besides promoter, enhancer, silencer, intron sequences, 3′UTR and/or 5′UTR regions) may be protein and/or RNA stabilizing elements. Such sequences would be known or may readily be obtained by a person skilled in the art.

[0051] The genetic constructs of the invention may further include an origin of replication sequence that is required for maintenance and/or replication in a specific cell type. One example is when a genetic construct is required to be maintained in a bacterial cell as an episomal genetic element (e.g. plasmid or cosmid molecule). Preferred origins of replication include, but are not limited to, the f1-ori and colE1.

[0052] For the detection of the successful transfer of the nucleic acid sequences as used in the methods of the invention and/or selection of transgenic plants comprising these nucleic acids, it is advantageous to use marker genes (or reporter genes). Therefore, the genetic construct may optionally comprise a selectable marker gene. Selectable markers are described in more detail in the “definitions” section herein. The marker genes may be removed or excised from the transgenic cell once they are no longer needed. Techniques for marker removal are known in the art, useful techniques are described above in the definitions section.

### Vector Construct/Vector

[0053] This is DNA (such as but, not limited to plasmids or viral DNA)—artificial in part or total or artificial in the arrangement of the genetic elements contained—capable of replication in a host cell and used for introduction of a DNA sequence of interest into a host cell or host organism. A vector may be a construct or may comprise at least one construct. A vector may replicate without integrating into the genome of a host cell, e.g. a plasmid vector in a bacterial host cell, or it may integrate part or all of its DNA into the genome of the host cell and thus lead to replication and expression of its DNA. Host cells of the invention may be any cell selected from bacterial cells, such as Escherichia coli or Agrobacterium species cells, yeast cells, fungal, algal or cyanobacterial cells or plant cells. The skilled artisan is well aware of the genetic elements that must be present on the genetic construct in order to successfully transform, select and propagate host cells containing the sequence of interest. Typically the vector comprises at least one expression cassette. The one or more sequence(s) of interest is operably linked to one or more control sequences (at least to a promoter) as described herein. Additional regulatory elements may include transcriptional as well as translational enhancers, one or more NEENA as described herein and/or one or more RENA as described herein. Those skilled in the art will be aware of terminator and enhancer sequences that may be suitable for use in performing the invention. An intron sequence may also be added to the 5′ untranslated region (UTR) or in the coding sequence to increase the amount of the mature message that accumulates in the cytosol, as described in the definitions section. Other control sequences (besides promoter, enhancer, silencer, intron sequences, 3′UTR and/or 5′UTR regions) may be protein and/or RNA stabilizing elements. Such sequences would be known or may readily be obtained by a person skilled in the art.

### Regulatory Element/Control Sequence/Promoter

[0054] The terms “regulatory element”, “control sequence” and “promoter” are all used interchangeably herein and are to be taken in a broad context to refer to regulatory nucleic acid sequences capable of effecting expression of the sequences to which they are ligated. The term “promoter” typically refers to a nucleic acid control sequence located upstream from the transcriptional start of a gene and which is involved in recognising and binding of RNA polymerase and other proteins, thereby directing transcription of an operably linked nucleic acid. Encompassed by the aforementioned terms are transcriptional regulatory sequences derived from a classical eukaryotic genomic gene (including the TATA box which is required for accurate transcription initiation, with or without a CCAAT box sequence) and additional regulatory elements (i.e. upstream activating sequences, enhancers and silencers) which alter gene expression in response to developmental and/or external stimuli, or in a tissue-specific manner. Also included within the term is a transcriptional regulatory sequence of a classical prokaryotic gene, in which case it may include a −35 box sequence and/or −10 box transcriptional regulatory sequences. The term “regulatory element” also encompasses a synthetic fusion molecule or derivative that confers, activates or enhances expression of a nucleic acid molecule in a cell, tissue or organ.

[0055] A “plant promoter” comprises regulatory elements, which mediate the expression of a coding sequence segment in plant cells. Accordingly, a plant promoter need not be of plant origin, but may originate from viruses or micro-organisms, for example from viruses which attack plant cells. The “plant promoter” can also originate from a plant cell, e.g. from the plant which is transformed with the nucleic acid sequence to be expressed in the inventive process and described herein. This also applies to other “plant” regulatory signals, such as “plant” terminators. The promoters upstream of the nucleotide sequences useful in the methods of the present invention can be modified by one or more nucleotide substitution(s), insertion(s) and/or deletion(s) without interfering with the functionality or activity of either the promoters, the open reading frame (ORF) or the 3′-regulatory region such as terminators or other 3′ regulatory regions which are located away from the ORF. It is furthermore possible that the activity of the promoters is increased by modification of their sequence, or that they are replaced completely by more active promoters, even promoters from heterologous organisms. For expression in plants, the nucleic acid molecule must, as described herein, be linked operably to or comprise a suitable promoter which expresses the gene at the right point in time and with the required spatial expression pattern.

[0056] For the identification of functionally equivalent promoters, the promoter strength and/or expression pattern of a candidate promoter may be analysed for example by operably linking the promoter to a reporter gene and assaying the expression level and pattern of the reporter gene in various tissues of the plant. Suitable well-known reporter genes include for example beta-glucuronidase or beta-galactosidase. The promoter activity is assayed by measuring the enzymatic activity of the beta-glucuronidase or beta-galactosidase. The promoter strength and/or expression pattern may then be compared to that of a reference promoter (such as the one used in the methods of the present invention). Alternatively, promoter strength may be assayed by quantifying mRNA levels or by comparing mRNA levels of the nucleic acid used in the methods of the present invention, with mRNA levels of housekeeping genes such as 18S rRNA, using methods known in the art, such as Northern blotting with densitometric analysis of autoradiograms, quantitative real-time PCR or RT-PCR (Heid et al., 1996 Genome Methods 6: 986-994). Generally by “weak promoter” is intended a promoter that drives expression of a coding sequence at a low level. By “low level” is intended at levels of about 1/10,000 transcripts to about 1/100,000 transcripts, to about 1/500,000 transcripts per cell. Conversely, a “strong promoter” drives expression of a coding sequence at high level, or at about 1/10 transcripts to about 1/100 transcripts to about 1/1000 transcripts per cell. Generally, by “medium strength promoter” is intended a promoter that drives expression of a coding sequence at a lower level than a strong promoter, in particular at a level that is in all instances below that obtained when under the control of a 35S CaMV promoter.

### Operably Linked

[0057] The term “operably linked” or “functionally linked” is used interchangeably and, as used herein, refers to a functional linkage between the promoter sequence and the gene of interest, such that the promoter sequence is able to direct transcription of the gene of interest.

[0058] The term “functional linkage” or “functionally linked” with respect to regulatory elements, is to be understood as meaning, for example, the sequential arrangement of a regulatory element (e.g. a promoter) with a nucleic acid sequence to be expressed and, if appropriate, further regulatory elements (such as e.g., a terminator, NEENA or a RENA) in such a way that each of the regulatory elements can fulfil its intended function to allow, modify, facilitate or otherwise influence expression of said nucleic acid sequence. As a synonym the wording “operable linkage” or “operably linked” may be used. The expression may result, depending on the arrangement of the nucleic acid sequences, in sense or antisense RNA. To this end, direct linkage in the chemical sense is not necessarily required. Genetic control sequences such as, for example, enhancer sequences, can also exert their function on the target sequence from positions which are further away, or indeed from other DNA molecules. Preferred arrangements are those in which the nucleic acid sequence to be expressed is recombinantly positioned behind the sequence acting as promoter, so that the two sequences are linked covalently to each other. The distance between the promoter sequence and the recombinant nucleic acid sequence to be expressed is preferably less than 200 base pairs, especially preferably less than 100 base pairs, very especially preferably less than 50 base pairs. In a preferred embodiment, the nucleic acid sequence to be transcribed is located behind the promoter in such a way that the transcription start is identical with the desired beginning of the chimeric RNA of the invention. Functional linkage, and an expression construct, can be generated by means of customary recombination and cloning techniques as described (e.g., in Maniatis T, Fritsch E F and Sambrook J (1989) Molecular Cloning: A Laboratory Manual, 2nd Ed., Cold Spring Harbor Laboratory, Cold Spring Harbor (N.Y.); Silhavy et al. (1984) Experiments with Gene Fusions, Cold Spring Harbor Laboratory, Cold Spring Harbor (N.Y.); Ausubel et al. (1987) Current Protocols in Molecular Biology, Greene Publishing Assoc. and Wiley Interscience; Gelvin et al. (Eds) (1990) Plant Molecular Biology Manual; Kluwer Academic Publisher, Dordrecht, The Netherlands). However, further sequences, which, for example, act as a linker with specific cleavage sites for restriction enzymes, or as a signal peptide, may also be positioned between the two sequences. The insertion of sequences may also lead to the expression of fusion proteins. Preferably, the expression construct, consisting of a linkage of a regulatory region for example a promoter and nucleic acid sequence to be expressed, can exist in a vector-integrated form and be inserted into a plant genome, for example by transformation.

### Constitutive Promoter

[0059] A “constitutive promoter” refers to a promoter that is transcriptionally active during most, but not necessarily all, phases of growth and development and under most environmental conditions, in at least one cell, tissue or organ. Table 2a below gives examples of constitutive promoters.

TABLE 2a
Examples of constitutive promoters

| Gene Source | Reference |
|---|---|
| Actin | McElroy et al, Plant Cell, 2: 163-171, 1990 |
| HMGP | WO 2004/070039 |
| CAMV 35S | Odell et al, Nature, 313: 810-812, 1985 |
| CaMV 19S | Nilsson et al., Physiol. Plant. 100: 456-462, 1997 |
| GOS2 | de Pater et al, Plant J Nov; 2(6): 837-44, 1992, |
| | WO 2004/065596 |
| Ubiquitin | Christensen et al, Plant Mol. Biol. 18: 675-689, |
| | 1992 |
| Rice | Buchholz et al, Plant Mol Biol. 25(5): 837-43, 1994 |
| cyclophilin | |
| Maize H3 | Lepetit et al, Mol. Gen. Genet. 231: 276-285, 1992 |
| histone | |
| Alfalfa H3 | Wu et al. Plant Mol. Biol. 11: 641-649, 1988 |
| histone | |
| Actin 2 | An et al, Plant J. 10(1); 107-121, 1996 |
| 34S FMV | Sanger et al., Plant. Mol. Biol., 14, 1990: 433-443 |
| Rubisco | U.S. Pat. No. 4,962,028 |
| small | |
| subunit | |
| OCS | Leisner (1988) Proc Natl Acad Sci USA 85(5): 2553 |
| SAD1 | Jain et al., Crop Science, 39 (6), 1999: 1696 |
| SAD2 | Jain et al., Crop Science, 39 (6), 1999: 1696 |
| nos | Shaw et al. (1984) Nucleic Acids Res. 12(20): |
| | 7831-7846 |
| V-ATPase | WO 01/14572 |
| Super | WO 95/14098 |
| promoter | |
| G-box | WO 94/12015 |
| proteins | |

### Ubiquitous Promoter

[0060] A “ubiquitous promoter” is active in substantially all tissues or cells of an organism.

### Developmentally-Regulated Promoter

[0061] A “developmentally-regulated promoter” is active during certain developmental stages or in parts of the plant that undergo developmental changes.

### Inducible Promoter

[0062] An “inducible promoter” has induced or increased transcription initiation in response to a chemical (for a review see Gatz 1997, Annu. Rev. Plant Physiol. Plant Mol. Biol., 48:89-108), environmental or physical stimulus, or may be “stress-inducible”, i.e. activated when a plant is exposed to various stress conditions, or a “pathogen-inducible” i.e. activated when a plant is exposed to exposure to various pathogens.

### Organ-Specific/Tissue-Specific Promoter

[0063] An “organ-specific” or “tissue-specific promoter” is one that is capable of preferentially initiating transcription in certain organs or tissues, such as the leaves, roots, seed tissue etc. For example, a “root-specific promoter” is a promoter that is transcriptionally active predominantly in plant roots, substantially to the exclusion of any other parts of a plant, whilst still allowing for any leaky expression in these other plant parts. Promoters able to initiate transcription in certain cells only are referred to herein as “cell-specific”.

[0064] Examples of root-specific promoters are listed in Table 2b below:

TABLE 2b
Examples of root-specific promoters

| Gene Source | Reference |
|---|---|
| RCc3 | Plant Mol Biol. 1995 January; 27(2): 237-48 |
| Arabidopsis | Koyama et al. J Biosci Bioeng. 2005 January; |
| PHT1 | 99(1): 38-42.; Mudge et al. (2002, Plant J. |
| | 31: 341) |
| Medicago | Xiao et al., 2006, Plant Biol (Stuttg). |
| phosphate | 2006 July; 8(4): 439-49 |
| transporter | |
| Arabidopsis | Nitz et al. (2001) Plant Sci 161(2): 337-346 |
| Pyk10 | |
| root-expressible | Tingey et al., EMBO J. 6: 1, 1987. |
| genes | |
| tobacco | Van der Zaal et al., Plant Mol. Biol. 16, |
| auxin-inducible | 983, 1991. |
| gene | |
| β-tubulin | Oppenheimer, et al., Gene 63: 87, 1988. |
| tobacco | Conkling, et al., Plant Physiol. 93: 1203, |
| root-specific | 1990. |
| genes | |
| B. napus G1-3b | U.S. Pat. No. 5,401,836 |
| gene | |
| SbPRP1 | Suzuki et al., Plant Mol. Biol. 21: 109-119, |
| | 1993. |
| LRX1 | Baumberger et al. 2001, Genes & Dev. 15: |
| | 1128 |
| BTG-26 | US 20050044585 |
| Brassica napus | |
| LeAMT1 (tomato) | Lauter et al. (1996, PNAS 3: 8139) |
| The LeNRT1-1 | Lauter et al. (1996, PNAS 3: 8139) |
| (tomato) | |
| class I patatin | Liu et al., Plant Mol. Biol. 17 (6): |
| gene (potato) | 1139-1154 |
| KDC1 | Downey et al. (2000, J. Biol. Chem. 275: |
| (Daucus carota) | 39420) |
| TobRB7 gene | W Song (1997) PhD Thesis, North Carolina |
| | State University, Raleigh, NC USA |
| OsRAB5a (rice) | Wang et al. 2002, Plant Sci. 163: 273 |
| ALF5 | Diener et al. (2001, Plant Cell 13: 1625) |
| (Arabidopsis) | |
| NRT2; 1Np | Quesada et al. (1997, Plant Mol. Biol. 34: |
| (N. | 265) |
| plumbaginifolia) | |

[0065] A “seed-specific promoter” is transcriptionally active predominantly in seed tissue, but not necessarily exclusively in seed tissue (in cases of leaky expression). The seed-specific promoter may be active during seed development and/or during germination. The seed specific promoter may be endosperm/aleurone/embryo specific. Examples of seed-specific promoters (endosperm/aleurone/embryo specific) are shown in Table 2c to Table 2f below. Further examples of seed-specific promoters are given in Qing Qu and Takaiwa (Plant Biotechnol. J. 2, 113-125, 2004), which disclosure is incorporated by reference herein as if fully set forth.

TABLE 2c
Examples of seed-specific promoters

| Gene source | Reference |
|---|---|
| seed-specific genes | Simon et al., Plant Mol. Biol. 5: 191, 1985; |
| | Scofield et al., J. Biol. Chem. 262: 12202, 1987.; |
| | Baszczynski et al., Plant Mol. Biol. 14: 633, 1990. |
| Brazil Nut albumin | Pearson et al., Plant Mol. Biol. 18: 235-245, 1992. |
| legumin | Ellis et al., Plant Mol. Biol. 10: 203-214, 1988. |
| glutelin (rice) | Takaiwa et al., Mol. Gen. Genet. 208: 15-22, 1986; |
| | Takaiwa et al., FEBS Letts. 221: 43-47, 1987. |
| zein | Matzke et al Plant Mol Biol, 14(3): 323-32 1990 |
| napA | Stalberg et al, Planta 199: 515-519, 1996. |
| wheat LMW and HMW | Mol Gen Genet 216: 81-90, 1989; NAR 17: 461-2, 1989 |
| glutenin-1 | |
| wheat SPA | Albani et al, Plant Cell, 9: 171-184, 1997 |
| wheat α, β, γ-gliadins | EMBO J. 3: 1409-15, 1984 |
| barley Itr1 promoter | Diaz et al. (1995) Mol Gen Genet 248(5): 592-8 |
| barley B1, C, D, hordein | Theor Appl Gen 98: 1253-62, 1999; Plant J 4: 343-55, |
| | 1993; Mol Gen Genet 250: 750-60, 1996 |
| barley DOF | Mena et al, The Plant Journal, 116(1): 53-62, 1998 |
| blz2 | EP99106056.7 |
| synthetic promoter | Vicente-Carbajosa et al., Plant J. 13: 629-640, 1998. |
| rice prolamin NRP33 | Wu et al, Plant Cell Physiology 39(8) 885-889, 1998 |
| rice a-globulin Glb-1 | Wu et al, Plant Cell Physiology 39(8) 885-889, 1998 |
| rice OSH1 | Sato et al, Proc. Natl. Acad. Sci. USA, 93: 8117-8122, |
| | 1996 |
| rice α-globulin | Nakase et al. Plant Mol. Biol. 33: 513-522, 1997 |
| REB/OHP-1 | |
| rice ADP-glucose | Trans Res 6: 157-68, 1997 |
| pyrophosphorylase | |
| maize ESR gene family | Plant J 12: 235-46, 1997 |
| sorghum α-kafirin | DeRose et al., Plant Mol. Biol 32: 1029-35, 1996 |
| KNOX | Postma-Haarsma et al, Plant Mol. Biol. 39: 257-71, 1999 |
| rice oleosin | Wu et al, J. Biochem. 123: 386, 1998 |
| sunflower oleosin | Cummins et al., Plant Mol. Biol. 19: 873-876, 1992 |
| PRO0117, putative rice 40S | WO 2004/070039 |
| ribosomal protein | |
| PRO0136, rice alanine | unpublished |
| aminotransferase | |
| PRO0147, trypsin inhibitor | unpublished |
| ITR1 (barley) | |
| PRO0151, rice WSI18 | WO 2004/070039 |
| PRO0175, rice RAB21 | WO 2004/070039 |
| PRO005 | WO 2004/070039 |
| PRO0095 | WO 2004/070039 |
| α-amylase (Amy32b) | Lanahan et al, Plant Cell 4: 203-211, 1992; Skriver et al, |
| | Proc Natl Acad Sci USA 88: 7266-7270, 1991 |
| cathepsin β-like gene | Cejudo et al, Plant Mol Biol 20: 849-856, 1992 |
| Barley Ltp2 | Kalla et al., Plant J. 6: 849-60, 1994 |
| Chi26 | Leah et al., Plant J. 4: 579-89, 1994 |
| Maize B-Peru | Selinger et al., Genetics 149; 1125-38, 1998 |

TABLE 2d
examples of endosperm-specific promoters

| Gene source | Reference |
|---|---|
| glutelin (rice) | Takaiwa et al. (1986) Mol Gen Genet 208: 15-22; |
| | Takaiwa et al. (1987) FEBS Letts. 221: 43-47 |
| zein | Matzke et al., (1990) Plant Mol Biol 14(3): |
| | 323-32 |
| wheat LMW and | Colot et al. (1989) Mol Gen Genet 216: 81-90, |
| HMW glutenin-1 | Anderson et al. (1989) NAR 17: 461-2 |
| wheat SPA | Albani et al. (1997) Plant Cell 9: 171-184 |
| wheat gliadins | Rafalski et al. (1984) EMBO 3: 1409-15 |
| barley Itr1 | Diaz et al. (1995) Mol Gen Genet 248(5): 592-8 |
| promoter | |
| barley B1, C, D, | Cho et al. (1999) Theor Appl Genet 98: 1253-62; |
| hordein | Muller et al. (1993) Plant J 4: 343-55; |
| | Sorenson et al. (1996) Mol Gen Genet 250: |
| | 750-60 |
| barley DOF | Mena et al, (1998) Plant J 116(1): 53-62 |
| blz2 | Onate et al. (1999) J Biol Chem 274(14): |
| | 9175-82 |
| synthetic | Vicente-Carbajosa et al. (1998) Plant J 13: |
| promoter | 629-640 |
| rice prolamin | Wu et al, (1998) Plant Cell Physiol 39(8) |
| NRP33 | 885-889 |
| rice globulin | Wu et al. (1998) Plant Cell Physiol 39(8) |
| Glb-1 | 885-889 |
| rice globulin | Nakase et al. (1997) Plant Molec Biol 33: |
| REB/OHP-1 | 513-522 |
| rice ADP-glucose | Russell et al. (1997) Trans Res 6: 157-68 |
| pyrophosphorylase | |
| maize ESR gene | Opsahl-Ferstad et al. (1997) Plant J 12: |
| family | 235-46 |
| sorghum kafirin | DeRose et al. (1996) Plant Mol Biol 32: |
| | 1029-35 |

TABLE 2e
Examples of embryo specific promoters:

| Gene source | Reference |
|---|---|
| rice OSH1 | Sato et al, Proc. Natl. Acad. Sci. USA, 93: |
| | 8117-8122, 1996 |
| KNOX | Postma-Haarsma et al, Plant Mol. Biol. 39: |
| | 257-71, 1999 |
| PRO0151 | WO 2004/070039 |
| PRO0175 | WO 2004/070039 |
| PRO005 | WO 2004/070039 |
| PRO0095 | WO 2004/070039 |

TABLE 2f
Examples of aleurone-specific promoters:

| Gene source | Reference |
|---|---|
| α-amylase | Lanahan et al, Plant Cell 4: 203-211, 1992; |
| (Amy32b) | Skriver et al, Proc Natl Acad Sci USA 88: |
| | 7266-7270, 1991 |
| cathepsin | Cejudo et al, Plant Mol Biol 20: 849-856, 1992 |
| β-like gene | |
| Barley Ltp2 | Kalla et al., Plant J. 6: 849-60, 1994 |
| Chi26 | Leah et al., Plant J. 4: 579-89, 1994 |
| Maize B-Peru | Selinger et al., Genetics 149; 1125-38, 1998 |

[0066] A “green tissue-specific promoter” as defined herein is a promoter that is transcriptionally active predominantly in green tissue, substantially to the exclusion of any other parts of a plant, whilst still allowing for any leaky expression in these other plant parts. Examples of green tissue-specific promoters which may be used to perform the methods of the invention are shown in Table 2g below.

TABLE 2g
Examples of green tissue-specific promoters

| Gene | Expression | Reference |
|---|---|---|
| Maize Orthophosphate | Leaf | Fukavama et al., Plant Physiol. |
| dikinase | specific | 2001 November; 127(3): 1136-46 |
| Maize | Leaf | Kausch et al., Plant Mol Biol. |
| Phosphoenolpyruvate | specific | 2001 January; 45(1): 1-15 |
| carboxylase | | |
| Rice | Leaf | Lin et al., 2004 DNA Seq. |
| Phosphoenolpyruvate | specific | 2004 August; 15(4): 269-76 |
| carboxylase | | |
| Rice small subunit | Leaf | Nomura et al., Plant Mol Biol. |
| Rubisco | specific | 2000 September; 44(1): 99-106 |
| rice beta expansin | Shoot | WO 2004/070039 |
| EXBP9 | specific | |
| Pigeonpea small | Leaf | Panguluri et al., Indian J Exp |
| subunit Rubisco | specific | Biol. 2005 April; 43(4): 369-72 |
| Pea RBCS3A | Leaf | |
| | specific | |

[0067] Another example of a tissue-specific promoter is a meristem-specific promoter, which is transcriptionally active predominantly in meristematic tissue, substantially to the exclusion of any other parts of a plant, whilst still allowing for any leaky expression in these other plant parts. Examples of green meristem-specific promoters which may be used to perform the methods of the invention are shown in Table 2h below.

TABLE 2h
Examples of meristem-specific promoters

| Gene source | Expression pattern | Reference |
|---|---|---|
| rice OSH1 | Shoot apical meristem, | Sato et al. (1996) |
| | from embryo globular | Proc. Natl. Acad. Sci. |
| | stage to seedling stage | USA, 93: 8117-8122 |
| Rice | Meristem specific | BAD87835.1 |
| metallothionein | | |
| WAK1 & WAK 2 | Shoot and root apical | Wagner & Kohorn (2001) |
| | meristems, and in | Plant Cell 13(2): |
| | expanding leaves and | 303-318 |
| | sepals | |

### Terminator

[0068] The term “terminator” encompasses a control sequence which is a DNA sequence at the end of a transcriptional unit which signals 3′ processing and polyadenylation of a primary transcript and termination of transcription. The terminator can be derived from the natural gene, from a variety of other plant genes, or from T-DNA. The terminator to be added may be derived from, for example, the nopaline synthase or octopine synthase genes, or alternatively from another plant gene, or less preferably from any other eukaryotic gene.

### Selectable Marker (Gene)/Reporter Gene

[0069] “Selectable marker”, “selectable marker gene” or “reporter gene” includes any gene that confers a phenotype on a cell in which it is expressed to facilitate the identification and/or selection of cells that are transfected or transformed with a nucleic acid construct of the invention. These marker genes enable the identification of a successful transfer of the nucleic acid molecules via a series of different principles. Suitable markers may be selected from markers that confer antibiotic or herbicide resistance, that introduce a new metabolic trait or that allow visual selection. Examples of selectable marker genes include genes conferring resistance to antibiotics (such as nptll that phosphorylates neomycin and kanamycin, or hpt, phosphorylating hygromycin, or genes conferring resistance to, for example, bleomycin, streptomycin, tetracyclin, chloramphenicol, ampicillin, gentamycin, geneticin (G418), spectinomycin or blasticidin), to herbicides (for example bar which provides resistance to Basta®; aroA or gox providing resistance against glyphosate, or the genes conferring resistance to, for example, imidazolinone, phosphinothricin or sulfonylurea), or genes that provide a metabolic trait (such as manA that allows plants to use mannose as sole carbon source or xylose isomerase for the utilisation of xylose, or antinutritive markers such as the resistance to 2-deoxyglucose). Expression of visual marker genes results in the formation of colour (for example β-glucuronidase, GUS or β-galactosidase with its coloured substrates, for example X-Gal), luminescence (such as the luciferin/luceferase system) or fluorescence (Green Fluorescent Protein, GFP, and derivatives thereof). This list represents only a small number of possible markers. The skilled worker is familiar with such markers. Different markers are preferred, depending on the organism and the selection method.

[0070] It is known that upon stable or transient integration of nucleic acids into plant cells, only a minority of the cells takes up the foreign DNA and, if desired, integrates it into its genome, depending on the expression vector used and the transfection technique used. To identify and select these integrants, a gene coding for a selectable marker (such as the ones described above) is usually introduced into the host cells together with the gene of interest. These markers can for example be used in mutants in which these genes are not functional by, for example, deletion by conventional methods. Furthermore, nucleic acid molecules encoding a selectable marker can be introduced into a host cell on the same vector that comprises the sequence encoding the polypeptides of the invention or used in the methods of the invention, or else in a separate vector. Cells which have been stably transfected with the introduced nucleic acid can be identified for example by selection (for example, cells which have integrated the selectable marker survive whereas the other cells die).

[0071] Since the marker genes, particularly genes for resistance to antibiotics and herbicides, are no longer required or are undesired in the transgenic host cell once the nucleic acids have been introduced successfully, the process according to the invention for introducing the nucleic acids advantageously employs techniques which enable the removal or excision of these marker genes. One such a method is what is known as co-transformation. The co-transformation method employs two vectors simultaneously for the transformation, one vector bearing the nucleic acid according to the invention and a second bearing the marker gene(s). A large proportion of transformants receives or, in the case of plants, comprises (up to 40% or more of the transformants), both vectors. In case of transformation with Agrobacteria, the transformants usually receive only a part of the vector, i.e. the sequence flanked by the T-DNA, which usually represents the expression cassette. The marker genes can subsequently be removed from the transformed plant by performing crosses. In another method, marker genes integrated into a transposon are used for the transformation together with desired nucleic acid (known as the Ac/Ds technology). The transformants can be crossed with a transposase source or the transformants are transformed with a nucleic acid construct conferring expression of a transposase, transiently or stable. In some cases (approx. 10%), the transposon jumps out of the genome of the host cell once transformation has taken place successfully and is lost. In a further number of cases, the transposon jumps to a different location. In these cases the marker gene must be eliminated by performing crosses. In microbiology, techniques were developed which make possible, or facilitate, the detection of such events. A further advantageous method relies on what is known as recombination systems; whose advantage is that elimination by crossing can be dispensed with. The best-known system of this type is what is known as the Cre/lox system. Cre1 is a recombinase that removes the sequences located between the loxP sequences. If the marker gene is integrated between the loxP sequences, it is removed once transformation has taken place successfully, by expression of the recombinase. Further recombination systems are the HIN/HIX, FLP/FRT and REP/STB system (Tribble et al., J. Biol. Chem., 275, 2000: 22255-22267; Velmurugan et al., J. Cell Biol., 149, 2000: 553-566). A site-specific integration into the plant genome of the nucleic acid sequences according to the invention is possible. Naturally, these methods can also be applied to microorganisms such as yeast, fungi or bacteria.

### Transgenic/Transgene/Recombinant

[0072] For the purposes of the invention, “transgenic”, “transgene” or “recombinant” means with regard to, for example, a nucleic acid sequence, an expression cassette, genetic construct or a vector comprising the nucleic acid sequence or an organism transformed with the nucleic acid sequences, expression cassettes or vectors according to the invention, all those constructions brought about by recombinant methods in which either
[0073] (a) the nucleic acid sequences encoding proteins useful in the methods of the invention, or
[0074] (b) genetic control sequence(s) which is operably linked with the nucleic acid sequence according to the invention, for example a promoter, or
[0075] (c) (a) and (b)
   are not located in their natural genetic environment or have been modified by recombinant methods, it being possible for the modification to take the form of, for example, a substitution, addition, deletion, inversion or insertion of one or more nucleotide residues. The natural genetic environment is understood as meaning the natural genomic or chromosomal locus in the original plant or the presence in a genomic library. In the case of a genomic library, the natural genetic environment of the nucleic acid sequence is preferably retained, at least in part. The environment flanks the nucleic acid sequence at least on one side and has a sequence length of at least 50 bp, preferably at least 500 bp, especially preferably at least 1000 bp, most preferably at least 5000 bp. A naturally occurring expression cassette—for example the naturally occurring combination of the natural promoter of the nucleic acid sequences with the corresponding nucleic acid sequence encoding a polypeptide useful in the methods of the present invention, as defined above—becomes a transgenic expression cassette when this expression cassette is modified by man by non-natural, synthetic (“artificial”) methods such as, for example, mutagenic treatment. Suitable methods are described, for example, in U.S. Pat. No. 5,565,350 Furthermore, a naturally occurring expression cassette—for example the naturally occurring combination of the natural promoter of the nucleic acid sequences with the corresponding nucleic acid sequence encoding a protein useful in the methods of the present invention, as defined above—becomes a recombinant expression cassette when this expression cassette is not integrated in the natural genetic environment but in a different genetic environment as a result of an isolation of said expression cassette from its natural genetic environment and re-insertion at a different genetic environment.

[0076] A transgenic plant for the purposes of the invention is thus understood as meaning, as above, that the nucleic acids used in the method of the invention are not present in, or originating from, the genome of said plant, or are present in the genome of said plant but not at their natural locus in the genome of said plant, it being possible for the nucleic acids to be expressed homologously or heterologously. However, as mentioned, transgenic also means that, while the nucleic acids according to the invention or used in the inventive method are at their natural position in the genome of a plant, the sequence has been modified with regard to the natural sequence, and/or that the regulatory sequences of the natural sequences have been modified. Transgenic is preferably understood as meaning the expression of the nucleic acids according to the invention at an unnatural locus in the genome, i.e. homologous or, preferably, heterologous expression of the nucleic acids takes place. Preferred transgenic plants are mentioned herein.

[0077] It shall further be noted that in the context of the present invention, the term “isolated nucleic acid” or “isolated polypeptide” may in some instances be considered as a synonym for a “recombinant nucleic acid” or a “recombinant polypeptide”, respectively and refers to a nucleic acid or polypeptide that is not located in its natural genetic environment and/or that has been modified by recombinant methods. An isolated nucleic acid sequence or isolated nucleic acid molecule is one that is not in its native surrounding or its native nucleic acid neighbourhood, yet it is physically and functionally connected to other nucleic acid sequences or nucleic acid molecules and is found as part of a nucleic acid construct, vector sequence or chromosome. As used herein, the term “transgenic” relating to an organisms e.g. transgenic plant refers to an organism, e.g., a plant, plant cell, callus, plant tissue, or plant part that exogenously contains the nucleic acid, construct, vector or expression cassette described herein or a part thereof which is preferably introduced by processes that are not essentially biological, preferably by Agrobacteria-mediated transformation or particle bombardment. A transgenic plant for the purposes of the invention is thus understood as meaning, as above, that the nucleic acids de-scribed herein are not present in, or not originating from the genome of said plant, or are present in the genome of said plant but not at their natural genetic environment in the genome of said plant, it being possible for the nucleic acids to be expressed homologously or heterologously.

### Modulation

[0078] The term “modulation” means in relation to expression or gene expression, a process in which the expression level is changed by said gene expression in comparison to the control plant, the expression level may be increased or decreased. The original, unmodulated expression may be of any kind of expression of a structural RNA (rRNA, tRNA) or mRNA with subsequent translation. For the purposes of this invention, the original unmodulated expression may also be absence of any expression. The term “modulating the activity” or the term “modulating expression” with respect to the proteins or nucleic acids used in the methods constructs, expression cassettes, vectors, plants, seeds, host cells and uses of the invention shall mean any change of the expression which leads to enhanced yield-related traits in the plants. The expression can increase from zero (absence of, or immeasurable expression) to a certain amount, or can decrease from a certain amount to immeasurable small amounts or zero.

### Expression

[0079] The term “expression” or “gene expression” means the transcription of a specific gene or specific genes or specific genetic construct. The term “expression” or “gene expression” in particular means the transcription of a gene or genes or genetic construct into structural RNA (rRNA, tRNA) or mRNA with or without subsequent translation of the latter into a protein. The process includes transcription of DNA and processing of the resulting mRNA product. The term “expression” or “gene expression” can also include the translation of the mRNA and therewith the synthesis of the encoded protein, i.e., protein expression.

### Increased Expression/Overexpression

[0080] The term “increased expression” or “overexpression” as used herein means any form of expression that is additional to the original wild-type expression level. For the purposes of this invention, the original wild-type expression level might also be zero, i.e. absence of expression or immeasurable expression. Reference herein to “increased expression” is taken to mean an increase in gene expression and/or, as far as referring to polypeptides, increased polypeptide levels and/or increased polypeptide activity, relative to control plants. The increase in expression is in increasing order of preference at least 10%, 20%, 30%, 40% or 50%, 60%, 70%, 80%, 85%, 90%, or 95%, 96%, 97%, 98%, 99% or even more compared to that of control plants. The increase in expression may be in increasing order of preference at least 100%, 200%, 300%, 400%, 500%, 600%, 700%, 800%, 900%, 1000%, 2000%, 3000%, 4000% or 5000% or even more compared to that of control plants. In cases when the control plants have only very little expression, polypeptide levels or polypeptide activity of the sequence in question and/or the recombinant gene is under the control of strong regulatory element(s) the increase in expression, polypeptide levels or polypeptide activity may be at least 100 times, 200 times, 300 times, 400 times, 500 times, 600 times, 700 times, 800 times, 900 times, 1000 times, 2000 times, 3000 times, 5000 times, 10 000 times, 20 000 times, 50 000 times, 100 000 times or even more compared to that of control plants.

[0081] Methods for increasing expression of genes or gene products are well documented in the art and include, for example, overexpression driven by appropriate promoters, the use of transcription enhancers or translation enhancers. Isolated nucleic acids which serve as promoter or enhancer elements may be introduced in an appropriate position (typically upstream) of a non-heterologous form of a polynucleotide so as to increase expression of a nucleic acid encoding the polypeptide of interest. For example, endogenous promoters may be altered in vivo by mutation, deletion, and/or substitution (see, Kmiec, U.S. Pat. No. 5,565,350; Zarling et al., WO9322443), or isolated promoters may be introduced into a plant cell in the proper orientation and distance from a gene of the present invention so as to control the expression of the gene.

[0082] If polypeptide expression is desired, it is generally desirable to include a polyadenylation region at the 3′-end of a polynucleotide coding region. The polyadenylation region can be derived from the natural gene, from a variety of other plant genes, or from T-DNA. The 3′ end sequence to be added may be derived from, for example, the nopaline synthase or octopine synthase genes, or alternatively from another plant gene, or less preferably from any other eukaryotic gene.

[0083] An intron sequence may also be added to the 5′ untranslated region (UTR) or the coding sequence of the partial coding sequence to increase the amount of the mature message that accumulates in the cytosol. Inclusion of a spliceable intron in the transcription unit in both plant and animal expression constructs has been shown to increase gene expression at both the mRNA and protein levels up to 1000-fold (Buchman and Berg (1988) Mol. Cell biol. 8: 4395-4405; Callis et al. (1987) Genes Dev 1:1183-1200). Such intron enhancement of gene expression is typically greatest when placed near the 5′ end of the transcription unit. Use of the maize introns Adh1-S intron 1, 2, and 6, the Bronze-1 intron are known in the art. For general information see: The Maize Handbook, Chapter 116, Freeling and Walbot, Eds., Springer, N.Y. (1994).

[0084] To obtain increased expression or overexpression of a polypeptide most commonly the nucleic acid encoding this polypeptide is overexpressed in sense orientation with a polyadenylation signal. Introns or other enhancing elements may be used in addition to a promoter suitable for driving expression with the intended expression pattern. In contrast to this, overexpression of the same nucleic acid sequence as antisense construct will not result in increased expression of the protein, but decreased expression of the protein.

### Transformation

[0085] The term “introduction” or “transformation” as referred to herein encompasses the transfer of an exogenous polynucleotide into a host cell, irrespective of the method used for transfer. Plant tissue capable of subsequent clonal propagation, whether by organogenesis or embryogenesis, may be transformed with a genetic construct of the present invention and a whole plant regenerated there from. The particular tissue chosen will vary depending on the clonal propagation systems available for, and best suited to, the particular species being transformed. Exemplary tissue targets include leaf disks, pollen, embryos, cotyledons, hypocotyls, megagametophytes, callus tissue, existing meristematic tissue (e.g., apical meristem, axillary buds, and root meristems), and induced meristem tissue (e.g., cotyledon meristem and hypocotyl meristem). The polynucleotide may be transiently or stably introduced into a host cell and may be maintained non-integrated, for example, as a plasmid. Alternatively, it may be integrated into the host genome. The resulting transformed plant cell may then be used to regenerate a transformed plant in a manner known to persons skilled in the art. Alternatively, a plant cell that cannot be regenerated into a plant may be chosen as host cell, i.e. the resulting transformed plant cell does not have the capacity to regenerate into a (whole) plant.

[0086] The transfer of foreign genes into the genome of a plant is called transformation. Transformation of plant species is now a fairly routine technique. Advantageously, any of several transformation methods may be used to introduce the gene of interest into a suitable ancestor cell. The methods described for the transformation and regeneration of plants from plant tissues or plant cells may be utilized for transient or for stable transformation. Transformation methods include the use of liposomes, electroporation, chemicals that increase free DNA uptake, injection of the DNA directly into the plant, particle gun bombardment, transformation using viruses or pollen and microprojection. Methods may be selected from the calcium/polyethylene glycol method for protoplasts (Krens, F. A. et al., (1982) Nature 296, 72-74; Negrutiu I et al. (1987) Plant Mol Biol 8: 363-373); electroporation of protoplasts (Shillito R. D. et al. (1985) Bio/Technol 3, 1099-1102); microinjection into plant material (Crossway A et al., (1986) Mol. Gen Genet 202: 179-185); DNA or RNA-coated particle bombardment (Klein T M et al., (1987) Nature 327: 70) infection with (non-integrative) viruses and the like. Transgenic plants, including transgenic crop plants, are preferably produced via Agrobacterium-mediated transformation. An advantageous transformation method is the transformation in planta. To this end, it is possible, for example, to allow the agrobacteria to act on plant seeds or to inoculate the plant meristem with agrobacteria. It has proved particularly expedient in accordance with the invention to allow a suspension of transformed agrobacteria to act on the intact plant or at least on the flower primordia. The plant is subsequently grown on until the seeds of the treated plant are obtained (Clough and Bent, Plant J. (1998) 16, 735-743). Methods for Agrobacterium-mediated transformation of rice include well known methods for rice transformation, such as those described in any of the following: European patent application EP 1198985 A1, Aldemita and Hodges (Planta 199: 612-617, 1996); Chan et al. (Plant Mol Biol 22 (3): 491-506, 1993), Hiei et al. (Plant J 6 (2): 271-282, 1994), which disclosures are incorporated by reference herein as if fully set forth. In the case of corn transformation, the preferred method is as described in either Ishida et al. (Nat. Biotechnol 14(6): 745-50, 1996) or Frame et al. (Plant Physiol 129(1): 13-22, 2002), which disclosures are incorporated by reference herein as if fully set forth. Said methods are further described by way of example in B. Jenes et al., Techniques for Gene Transfer, in: Transgenic Plants, Vol. 1, Engineering and Utilization, eds. S. D. Kung and R. Wu, Academic Press (1993) 128-143 and in Potrykus Annu. Rev. Plant Physiol. Plant Molec. Biol. 42 (1991) 205-225). The nucleic acids or the construct to be expressed is preferably cloned into a vector, which is suitable for transforming Agrobacterium tumefaciens, for example pBin19 (Bevan et al., Nucl. Acids Res. 12 (1984) 8711). Agrobacteria transformed by such a vector can then be used in known manner for the transformation of plants, such as plants used as a model, like Arabidopsis (Arabidopsis thaliana is within the scope of the present invention not considered as a crop plant), or crop plants such as, by way of example, tobacco plants, for example by immersing bruised leaves or chopped leaves in an agrobacterial solution and then culturing them in suitable media. The transformation of plants by means of Agrobacterium tumefaciens is described, for example, by Höfgen and Willmitzer in Nucl. Acid Res. (1988) 16, 9877 or is known inter alia from F. F. White, Vectors for Gene Transfer in Higher Plants; in Transgenic Plants, Vol. 1, Engineering and Utilization, eds. S. D. Kung and R. Wu, Academic Press, 1993, pp. 15-38.

[0087] In addition to the transformation of somatic cells, which then have to be regenerated into intact plants, it is also possible to transform the cells of plant meristems and in particular those cells which develop into gametes. In this case, the transformed gametes follow the natural plant development, giving rise to transgenic plants. Thus, for example, seeds of Arabidopsis are treated with agrobacteria and seeds are obtained from the developing plants of which a certain proportion is transformed and thus transgenic [Feldman, K A and Marks M D (1987). Mol Gen Genet 208:1-9; Feldmann K (1992). In: C Koncz, N-H Chua and J Shell, eds, Methods in Arabidopsis Research. Word Scientific, Singapore, pp. 274-289]. Alternative methods are based on the repeated removal of the inflorescences and incubation of the excision site in the center of the rosette with transformed agrobacteria, whereby transformed seeds can likewise be obtained at a later Point in time (Chang (1994). Plant J. 5: 551-558; Katavic (1994). Mol Gen Genet, 245: 363-370). However, an especially effective method is the vacuum infiltration method with its modifications such as the “floral dip” method. In the case of vacuum infiltration of Arabidopsis, intact plants under reduced pressure are treated with an agrobacterial suspension [Bechthold, N (1993). C R Acad Sci Paris Life Sci, 316: 1194-1199], while in the case of the “floral dip” method the developing floral tissue is incubated briefly with a surfactant-treated agrobacterial suspension [Clough, S J and Bent A F (1998) The Plant J. 16, 735-743]. A certain proportion of transgenic seeds are harvested in both cases, and these seeds can be distinguished from non-transgenic seeds by growing under the above-described selective conditions. In addition the stable transformation of plastids is of advantages because plastids are inherited maternally is most crops reducing or eliminating the risk of transgene flow through pollen. The transformation of the chloroplast genome is generally achieved by a process which has been schematically displayed in Klaus et al., 2004 [Nature Biotechnology 22 (2), 225-229]. Briefly the sequences to be transformed are cloned together with a selectable marker gene between flanking sequences homologous to the chloroplast genome. These homologous flanking sequences direct site specific integration into the plastome. Plastidal transformation has been described for many different plant species and an overview is given in Bock (2001) Transgenic plastids in basic research and plant biotechnology. J Mol Biol. 2001 Sep. 21; 312 (3):425-38 or Maliga, P (2003) Progress towards commercialization of plastid transformation technology. Trends Biotechnol. 21, 20-28. Further biotechnological progress has recently been reported in form of marker free plastid transformants, which can be produced by a transient co-integrated maker gene (Klaus et al., 2004, Nature Biotechnology 22(2), 225-229).

[0088] The genetically modified plant cells can be regenerated via all methods with which the skilled worker is familiar. Suitable methods can be found in the abovementioned publications by S. D. Kung and R. Wu, Potrykus or Höfgen and Willmitzer. Alternatively, the genetically modified plant cells are non-regenerable into a whole plant.

[0089] Generally after transformation, plant cells or cell groupings are selected for the presence of one or more markers which are encoded by plant-expressible genes co-transferred with the gene of interest, following which the transformed material is regenerated into a whole plant. To select transformed plants, the plant material obtained in the transformation is, as a rule, subjected to selective conditions so that transformed plants can be distinguished from untransformed plants. For example, the seeds obtained in the above-described manner can be planted and, after an initial growing period, subjected to a suitable selection by spraying. A further possibility consists in growing the seeds, if appropriate after sterilization, on agar plates using a suitable selection agent so that only the transformed seeds can grow into plants. Alternatively, the transformed plants are screened for the presence of a selectable marker such as the ones described above.

[0090] Following DNA transfer and regeneration, putatively transformed plants may also be evaluated, for instance using Southern analysis, for the presence of the gene of interest, copy number and/or genomic organisation. Alternatively or additionally, expression levels of the newly introduced DNA may be monitored using Northern and/or Western analysis, both techniques being well known to persons having ordinary skill in the art.

[0091] The generated transformed plants may be propagated by a variety of means, such as by clonal propagation or classical breeding techniques. For example, a first generation (or T1) transformed plant may be selfed and homozygous second-generation (or T2) transformants selected, and the T2 plants may then further be propagated through classical breeding techniques. The generated transformed organisms may take a variety of forms. For example, they may be chimeras of transformed cells and non-transformed cells; clonal transformants (e.g., all cells transformed to contain the expression cassette); grafts of transformed and untransformed tissues (e.g., in plants, a transformed rootstock grafted to an untransformed scion).

[0092] Throughout this application a plant, plant part, seed or plant cell transformed with—or interchangeably transformed by—a construct or transformed with or by a nucleic acid is to be understood as meaning a plant, plant part, seed or plant cell that carries said construct or said nucleic acid as a transgene due the result of an introduction of this construct or this nucleic acid by biotechnological means. The plant, plant part, seed or plant cell therefore comprises this recombinant construct or this recombinant nucleic acid.

[0093] Throughout this application a plant, plant part, seed or plant cell transformed with—or interchangeably transformed by—a construct or transformed with or by a nucleic acid is to be understood as meaning a plant, plant part, seed or plant cell that carries said construct or said nucleic acid as a transgene due the result of an introduction of this construct or this nucleic acid by biotechnological means. The plant, plant part, seed or plant cell therefore comprises this recombinant construct or this recombinant nucleic acid.

### T-DNA Activation Tagging

[0094] “T-DNA activation” tagging (Hayashi et al. Science (1992) 1350-1353), involves insertion of T-DNA, usually containing a promoter (may also be a translation enhancer or an intron), in the genomic region of the gene of interest or 10 kb up- or downstream of the coding region of a gene in a configuration such that the promoter directs expression of the targeted gene. Typically, regulation of expression of the targeted gene by its natural promoter is disrupted and the gene falls under the control of the newly introduced promoter. The promoter is typically embedded in a T-DNA. This T-DNA is randomly inserted into the plant genome, for example, through Agrobacterium infection and leads to modified expression of genes near the inserted T-DNA. The resulting transgenic plants show dominant phenotypes due to modified expression of genes close to the introduced promoter.

### Tilling

[0095] The term “TILLING” is an abbreviation of “Targeted Induced Local Lesions In Genomes” and refers to a mutagenesis technology useful to generate and/or identify nucleic acids encoding proteins with modified expression and/or activity. TILLING also allows selection of plants carrying such mutant variants. These mutant variants may exhibit modified expression, either in strength or in location or in timing (if the mutations affect the promoter for example). These mutant variants may exhibit higher activity than that exhibited by the gene in its natural form. TILLING combines high-density mutagenesis with high-throughput screening methods. The steps typically followed in TILLING are: (a) EMS mutagenesis (Redei G P and Koncz C (1992) In Methods in Arabidopsis Research, Koncz C, Chua N H, Schell J, eds. Singapore, World Scientific Publishing Co, pp. 16-82; Feldmann et al., (1994) In Meyerowitz E M, Somerville C R, eds, Arabidopsis. Cold Spring Harbor Laboratory Press, Cold Spring Harbor, N.Y., pp 137-172; Lightner J and Caspar T (1998) In J Martinez-Zapater, J Salinas, eds, Methods on Molecular Biology, Vol. 82. Humana Press, Totowa, N.J., pp 91-104); (b) DNA preparation and pooling of individuals; (c) PCR amplification of a region of interest; (d) denaturation and annealing to allow formation of heteroduplexes; (e) DHPLC, where the presence of a heteroduplex in a pool is detected as an extra peak in the chromatogram; (f) identification of the mutant individual; and (g) sequencing of the mutant PCR product. Methods for TILLING are well known in the art (McCallum et al., (2000) Nat Biotechnol 18: 455-457; reviewed by Stemple (2004) Nat Rev Genet 5(2): 145-50).

### Homologous Recombination

[0096] “Homologous recombination” allows introduction in a genome of a selected nucleic acid at a defined selected position. Homologous recombination is a standard technology used routinely in biological sciences for lower organisms such as yeast or the moss Physcomitrella. Methods for performing homologous recombination in plants have been described not only for model plants (Offringa et al. (1990) EMBO J 9(10): 3077-84) but also for crop plants, for example rice (Terada et al. (2002) Nat Biotech 20(10): 1030-4; lida and Terada (2004) Curr Opin Biotech 15(2): 132-8), and approaches exist that are generally applicable regardless of the target organism (Miller et al, Nature Biotechnol. 25, 778-785, 2007).

### Yield Related Trait(s)

[0097] A “Yield related trait” is a trait or feature which is related to plant yield. Yield-related traits may comprise one or more of the following non-limitative list of features: early flowering time, yield, biomass, seed yield, early vigour, greenness index, growth rate, agronomic traits, such as e.g. tolerance to submergence (which leads to yield in rice), Water Use Efficiency (WUE), Nitrogen Use Efficiency (NUE), etc.

[0098] Reference herein to “enhanced yield-related trait” is taken to mean an increase relative to control plants in a yield-related trait, for instance in early vigour and/or in biomass, of a whole plant or of one or more parts of a plant, which may include (i) aboveground parts, preferably aboveground harvestable parts, and/or (ii) parts below ground, preferably harvestable parts below ground.

[0099] In particular, such harvestable parts are roots such as taproots, stems, beets, tubers, leaves, flowers or seeds.

### Yield

[0100] The term “yield” in general means a measurable produce of economic value, typically related to a specified crop, to an area, and to a period of time. Individual plant parts directly contribute to yield based on their number, size and/or weight, or the actual yield is the yield per square meter for a crop and year, which is determined by dividing total production (includes both harvested and appraised production) by planted square meters.

[0101] The terms “yield” of a plant and “plant yield” are used interchangeably herein and are meant to refer to vegetative biomass such as root and/or shoot biomass, to reproductive organs, and/or to propagules such as seeds of that plant.

[0102] Flowers in maize are unisexual; male inflorescences (tassels) originate from the apical stem and female inflorescences (ears) arise from axillary bud apices. The female inflorescence produces pairs of spikelets on the surface of a central axis (cob). Each of the female spikelets encloses two fertile florets, one of them will usually mature into a maize kernel once fertilized. Hence a yield increase in maize may be manifested as one or more of the following: increase in the number of plants established per square meter, an increase in the number of ears per plant, an increase in the number of rows, number of kernels per row, kernel weight, thousand kernel weight, ear length/diameter, increase in the seed filling rate, which is the number of filled florets (i.e. florets containing seed) divided by the total number of florets and multiplied by 100), among others.

[0103] Inflorescences in rice plants are named panicles. The panicle bears spikelets, which are the basic units of the panicles, and which consist of a pedicel and a floret. The floret is borne on the pedicel and includes a flower that is covered by two protective glumes: a larger glume (the lemma) and a shorter glume (the palea). Hence, taking rice as an example, a yield increase may manifest itself as an increase in one or more of the following: number of plants per square meter, number of panicles per plant, panicle length, number of spikelets per panicle, number of flowers (or florets) per panicle; an increase in the seed filling rate which is the number of filled florets (i.e. florets containing seeds) divided by the total number of florets and multiplied by 100; an increase in thousand kernel weight, among others.

### Early Flowering Time

[0104] Plants having an “early flowering time” as used herein are plants which start to flower earlier than control plants. Hence this term refers to plants that show an earlier start of flowering. Flowering time of plants can be assessed by counting the number of days (“time to flower”) between sowing and the emergence of a first inflorescence. The “flowering time” of a plant can for instance be determined using the method as described in WO 2007/093444.

### Early Vigour

[0105] “Early vigour” refers to active healthy well-balanced growth especially during early stages of plant growth, and may result from increased plant fitness due to, for example, the plants being better adapted to their environment (i.e. optimizing the use of energy resources and partitioning between shoot and root). Plants having early vigour also show increased seedling survival and a better establishment of the crop, which often results in highly uniform fields (with the crop growing in uniform manner, i.e. with the majority of plants reaching the various stages of development at substantially the same time), and often better and higher yield. Therefore, early vigour may be determined by measuring various factors, such as thousand kernel weight, percentage germination, percentage emergence, seedling growth, seedling height, root length, root and shoot biomass and many more.

### Increased Growth Rate

[0106] The increased growth rate may be specific to one or more parts of a plant (including seeds), or may be throughout substantially the whole plant. Plants having an increased growth rate may have a shorter life cycle. The life cycle of a plant may be taken to mean the time needed to grow from a mature seed up to the stage where the plant has produced mature seeds, similar to the starting material. This life cycle may be influenced by factors such as speed of germination, early vigour, growth rate, greenness index, flowering time and speed of seed maturation. The increase in growth rate may take place at one or more stages in the life cycle of a plant or during substantially the whole plant life cycle. Increased growth rate during the early stages in the life cycle of a plant may reflect enhanced vigour. The increase in growth rate may alter the harvest cycle of a plant allowing plants to be sown later and/or harvested sooner than would otherwise be possible (a similar effect may be obtained with earlier flowering time). If the growth rate is sufficiently increased, it may allow for the further sowing of seeds of the same plant species (for example sowing and harvesting of rice plants followed by sowing and harvesting of further rice plants all within one conventional growing period). Similarly, if the growth rate is sufficiently increased, it may allow for the further sowing of seeds of different plants species (for example the sowing and harvesting of corn plants followed by, for example, the sowing and optional harvesting of soybean, potato or any other suitable plant). Harvesting additional times from the same rootstock in the case of some crop plants may also be possible. Altering the harvest cycle of a plant may lead to an increase in annual biomass production per square meter (due to an increase in the number of times (say in a year) that any particular plant may be grown and harvested). An increase in growth rate may also allow for the cultivation of transgenic plants in a wider geographical area than their wild-type counterparts, since the territorial limitations for growing a crop are often determined by adverse environmental conditions either at the time of planting (early season) or at the time of harvesting (late season). Such adverse conditions may be avoided if the harvest cycle is shortened. The growth rate may be determined by deriving various parameters from growth curves, such parameters may be: T-Mid (the time taken for plants to reach 50% of their maximal size) and T-90 (time taken for plants to reach 90% of their maximal size), amongst others.

### Increase/Improve/Enhance

[0107] The terms “increase”, “improve” or “enhance” in the context of a yield-related trait are interchangeable and shall mean in the sense of the application at least a 3%, 4%, 5%, 6%, 7%, 8%, 9% or 10%, preferably at least 15% or 20%, more preferably 25%, 30%, 35% or 40% increase in the yield-related trait (such as more yield and/or growth) in comparison to control plants as defined herein.

### Seed Yield

[0108] Increased seed yield may manifest itself as one or more of the following:
[0109] a) an increase in seed biomass (total seed weight) which may be on an individual seed basis and/or per plant and/or per square meter;
[0110] b) increased number of flowers per plant;
[0111] c) increased number of seeds;
[0112] d) increased seed filling rate (which is expressed as the ratio between the number of filled florets divided by the total number of florets);
[0113] e) increased harvest index, which is expressed as a ratio of the yield of harvestable parts, such as seeds, divided by the biomass of aboveground plant parts; and
[0114] f) increased thousand kernel weight (TKW), which is extrapolated from the number of seeds counted and their total weight. An increased TKW may result from an increased seed size and/or seed weight, and may also result from an increase in embryo and/or endosperm size;
[0115] g) increased number of florets of a plant, which is expressed as the total number of empty seeds plus the total number filled seeds.

[0116] The terms “filled florets” and “filled seeds” may be considered synonyms. An increase in seed yield may also be manifested as an increase in seed size and/or seed volume. Furthermore, an increase in seed yield may also manifest itself as an increase in seed area and/or seed length and/or seed width and/or seed perimeter.

### Greenness Index

[0117] The “greenness index” as used herein is calculated from digital images of plants. For each pixel belonging to the plant object on the image, the ratio of the green value versus the red value (in the RGB model for encoding color) is calculated. The greenness index is expressed as the percentage of pixels for which the green-to-red ratio exceeds a given threshold. Under normal growth conditions, under salt stress growth conditions, and under reduced nutrient availability growth conditions, the greenness index of plants is measured in the last imaging before flowering. In contrast, under drought stress growth conditions, the greenness index of plants is measured in the first imaging after drought.

### Biomass

[0118] The term “biomass” as used herein is intended to refer to the total weight of a plant or plant part. Total weight can be measured as dry weight, fresh weight or wet weight. Within the definition of biomass, a distinction may be made between the biomass of one or more parts of a plant, which may include any one or more of the following:
[0119] aboveground parts such as but not limited to shoot biomass, seed biomass, leaf biomass, etc.;
[0120] aboveground harvestable parts such as but not limited to shoot biomass, seed biomass, leaf biomass, stem biomass, setts etc.;
[0121] parts below ground, such as but not limited to root biomass, tubers, bulbs, etc.;
[0122] harvestable parts below ground, such as but not limited to root biomass, tubers, bulbs, etc.;
[0123] harvestable parts partially below ground such as but not limited to beets and other hypocotyl areas of a plant, rhizomes, stolons or creeping rootstalks;
[0124] vegetative biomass such as root biomass, shoot biomass, etc.;
[0125] reproductive organs; and
[0126] propagules such as seed.

[0127] In a preferred embodiment throughout this application any reference to “root” as biomass or harvestable parts or as organ of increased sugar content is to be understood as a reference to harvestable parts partly inserted in or in physical contact with the ground such as but not limited to beets and other hypocotyl areas of a plant, rhizomes, stolons or creeping rootstalks, but not including leaves, as well as harvestable parts belowground, such as but not limited to root, taproot, tubers or bulbs.

### Marker Assisted Breeding

[0128] Such breeding programmes sometimes require introduction of allelic variation by mutagenic treatment of the plants, using for example EMS mutagenesis; alternatively, the programme may start with a collection of allelic variants of so called “natural” origin caused unintentionally. Identification of allelic variants then takes place, for example, by PCR. This is followed by a step for selection of superior allelic variants of the sequence in question and which give increased yield. Selection is typically carried out by monitoring growth performance of plants containing different allelic variants of the sequence in question. Growth performance may be monitored in a greenhouse or in the field. Further optional steps include crossing plants in which the superior allelic variant was identified with another plant. This could be used, for example, to make a combination of interesting phenotypic features.

### Use as Probes in (Gene Mapping)

[0129] Use of nucleic acids encoding the protein of interest for genetically and physically mapping the genes requires only a nucleic acid sequence of at least 15 nucleotides in length. These nucleic acids may be used as restriction fragment length polymorphism (RFLP) markers. Southern blots (Sambrook J, Fritsch E F and Maniatis T (1989) Molecular Cloning, A Laboratory Manual) of restriction-digested plant genomic DNA may be probed with the nucleic acids encoding the protein of interest. The resulting banding patterns may then be subjected to genetic analyses using computer programs such as MapMaker (Lander et al. (1987) Genomics 1: 174-181) in order to construct a genetic map. In addition, the nucleic acids may be used to probe Southern blots containing restriction endonuclease-treated genomic DNAs of a set of individuals representing parent and progeny of a defined genetic cross. Segregation of the DNA polymorphisms is noted and used to calculate the position of the nucleic acid encoding the protein of interest in the genetic map previously obtained using this population (Botstein et al. (1980) Am. J. Hum. Genet. 32:314-331).

[0130] The production and use of plant gene-derived probes for use in genetic mapping is described in Bernatzky and Tanksley (1986) Plant Mol. Biol. Reporter 4: 37-41. Numerous publications describe genetic mapping of specific cDNA clones using the methodology outlined above or variations thereof. For example, F2 intercross populations, backcross populations, randomly mated populations, near isogenic lines, and other sets of individuals may be used for mapping. Such methodologies are well known to those skilled in the art.

[0131] The nucleic acid probes may also be used for physical mapping (i.e., placement of sequences on physical maps; see Hoheisel et al. In: Non-mammalian Genomic Analysis: A Practical Guide, Academic press 1996, pp. 319-346, and references cited therein).

[0132] In another embodiment, the nucleic acid probes may be used in direct fluorescence in situ hybridisation (FISH) mapping (Trask (1991) Trends Genet. 7:149-154). Although current methods of FISH mapping favour use of large clones (several kb to several hundred kb; see Laan et al. (1995) Genome Res. 5:13-20), improvements in sensitivity may allow performance of FISH mapping using shorter probes.

[0133] A variety of nucleic acid amplification-based methods for genetic and physical mapping may be carried out using the nucleic acids. Examples include allele-specific amplification (Kazazian (1989) J. Lab. Clin. Med 11:95-96), polymorphism of PCR-amplified fragments (CAPS; Sheffield et al. (1993) Genomics 16:325-332), allele-specific ligation (Landegren et al. (1988) Science 241:1077-1080), nucleotide extension reactions (Sokolov (1990) Nucleic Acid Res. 18:3671), Radiation Hybrid Mapping (Walter et al. (1997) Nat. Genet. 7:22-28) and Happy Mapping (Dear and Cook (1989) Nucleic Acid Res. 17:6795-6807). For these methods, the sequence of a nucleic acid is used to design and produce primer pairs for use in the amplification reaction or in primer extension reactions. The design of such primers is well known to those skilled in the art. In methods employing PCR-based genetic mapping, it may be necessary to identify DNA sequence differences between the parents of the mapping cross in the region corresponding to the instant nucleic acid sequence. This, however, is generally not necessary for mapping methods.

### Plant

[0134] The term “plant” as used herein encompasses whole plants, ancestors and progeny of the plants and plant parts, including seeds, shoots, stems, leaves, roots (including tubers), flowers, and tissues and organs, wherein each of the aforementioned comprise the gene/nucleic acid of interest. The term “plant” also encompasses plant cells, suspension cultures, callus tissue, embryos, meristematic regions, gametophytes, sporophytes, pollen and microspores, again wherein each of the aforementioned comprises the gene/nucleic acid of interest.

[0135] Plants that are particularly useful in the methods of the invention include all plants which belong to the superfamily Viridiplantae, in particular monocotyledonous and dicotyledonous plants including fodder or forage legumes, ornamental plants, food crops, trees or shrubs selected from the list comprising Acer spp., Actinidia spp., Abelmoschus spp., Agave sisalana, Agropyron spp., Agrostis stolonifera, Allium spp., Amaranthus spp., Ammophila arenaria, Ananas comosus, Annona spp., Apium graveolens, Arachis spp, Artocarpus spp., Asparagus officinalis, Avena spp. (e.g. Avena sativa, Avena fatua, Avena byzantina, Avena fatua var. sativa, Avena hybrida), Averrhoa carambola, Bambusa sp., Benincasa hispida, Bertholletia excelsea, Beta vulgaris, Brassica spp. (e.g. Brassica napus, Brassica rapa ssp. [canola, oilseed rape, turnip rape]), Cadaba farinosa, Camellia sinensis, Canna indica, Cannabis sativa, Capsicum spp., Carex elata, Carica papaya, Carissa macrocarpa, Carya spp., Carthamus tinctorius, Castanea spp., Ceiba pentandra, Cichorium endivia, Cinnamomum spp., Citrullus lanatus, Citrus spp., Cocos spp., Coffea spp., Colocasia esculenta, Cola spp., Corchorus sp., Coriandrum sativum, Corylus spp., Crataegus spp., Crocus sativus, Cucurbita spp., Cucumis spp., Cynara spp., Daucus carota, Desmodium spp., Dimocarpus longan, Dioscorea spp., Diospyros spp., Echinochloa spp., Elaeis (e.g. Elaeis guineensis, Elaeis oleifera), Eleusine coracana, Eragrostis tef, Erianthus sp., Eriobotrya japonica, Eucalyptus sp., Eugenia uniflora, Fagopyrum spp., Fagus spp., Festuca arundinacea, Ficus carica, Fortunella spp., Fragaria spp., Ginkgo biloba, Glycine spp. (e.g. Glycine max, Soja hispida or Soja max), Gossypium hirsutum, Helianthus spp. (e.g. Helianthus annuus), Hemerocallis fulva, Hibiscus spp., Hordeum spp. (e.g. Hordeum vulgare), Ipomoea batatas, Juglans spp., Lactuca sativa, Lathyrus spp., Lens culinaris, Linum usitatissimum, Litchi chinensis, Lotus spp., Luffa acutangula, Lupinus spp., Luzula sylvatica, Lycopersicon spp. (e.g. Lycopersicon esculentum, Lycopersicon lycopersicum, Lycopersicon pyriforme), Macrotyloma spp., Malus spp., Malpighia emarginata, Mammea americana, Mangifera indica, Manihot spp., Manilkara zapota, Medicago sativa, Melilotus spp., Mentha spp., Miscanthus sinensis, Momordica spp., Morus nigra, Musa spp., Nicotiana spp., Olea spp., Opuntia spp., Ornithopus spp., Oryza spp. (e.g. Oryza sativa, Oryza latifolia), Panicum miliaceum, Panicum virgatum, Passiflora edulis, Pastinaca sativa, Pennisetum sp., Persea spp., Petroselinum crispum, Phalaris arundinacea, Phaseolus spp., Phleum pratense, Phoenix spp., Phragmites australis, Physalis spp., Pinus spp., Pistacia vera, Pisum spp., Poa spp., Populus spp., Prosopis spp., Prunus spp., Psidium spp., Punica granatum, Pyrus communis, Quercus spp., Raphanus sativus, Rheum rhabarbarum, Ribes spp., Ricinus communis, Rubus spp., Saccharum spp., Salix sp., Sambucus spp., Secale cereals, Sesamum spp., Sinapis sp., Solanum spp. (e.g. Solanum tuberosum, Solanum integrifolium or Solanum lycopersicum), Sorghum bicolor, Spinacia spp., Syzygium spp., Tagetes spp., Tamarindus indica, Theobroma cacao, Trifolium spp., Tripsacum dactyloides, Triticosecale rimpaui, Triticum spp. (e.g. Triticum aestivum, Triticum durum, Triticum turgidum, Triticum hybernum, Triticum macha, Triticum sativum, Triticum monococcum or Triticum vulgare), Tropaeolum minus, Tropaeolum majus, Vaccinium spp., Vicia spp., Vigna spp., Viola odorata, Vitis spp., Zea mays, Zizania palustris, Ziziphus spp., amongst others.

### Control Plant(s)

[0136] The choice of suitable control plants is a routine part of an experimental setup and may include corresponding wild type plants or corresponding plants without the gene of interest. The control plant is typically of the same plant species or even of the same variety as the plant to be assessed. The control plant may also be a nullizygote of the plant to be assessed. Nullizygotes (or null control plants) are individuals missing the transgene by segregation. Further, control plants are grown under equal growing conditions to the growing conditions of the plants of the invention, i.e. in the vicinity of, and simultaneously with, the plants of the invention. A “control plant” as used herein refers not only to whole plants, but also to plant parts, including seeds and seed parts.

### Propagation Material/Propagule

[0137] “Propagation material” or “propagule” is any kind of organ, tissue, or cell of a plant capable of developing into a complete plant. “Propagation material” can be based on vegetative reproduction (also known as vegetative propagation, vegetative multiplication, or vegetative cloning) or sexual reproduction. Propagation material can therefore be seeds or parts of the non-reproductive organs, like stem or leave. In particular, with respect to poaceae, suitable propagation material can also be sections of the stem, i.e., stem cuttings (like setts).

### Stalk

[0138] A “stalk” is the stem of a plant belonging the Poaceae, and is also known as the “millable cane”. In the context of poaceae “stalk”, “stem”, “shoot”, or “tiller” are used interchangeably.

### Sett

[0139] A “sett” is a section of the stem of a plant from the Poaceae, which is suitable to be used as propagation material. Synonymous expressions to “sett” are “seed-cane”, “stem cutting”, “section of the stalk”, and “seed piece”.

### DETAILED DESCRIPTION OF THE INVENTION

[0140] The present invention shows that modulating expression in a plant of a nucleic acid encoding a PAE1 polypeptide gives plants having one or more enhanced yield-related traits relative to control plants.

[0141] PAE 1 is a type of pectin acetylesterase (EC 3.1.1.6; PAE), which belongs to CAZy class 12 and 13 of the CE family (Gou et al, Plant Cell. 2012 January; 24(1): 50-65).

[0142] According to a first embodiment, the present invention provides a method for enhancing one or more yield-related traits in plants relative to control plants, comprising modulating expression in a plant of a nucleic acid encoding a PAE1 polypeptide and optionally selecting for plants having one or more enhanced yield-related traits. According to another embodiment, the present invention provides a method for producing plants having one or more enhanced yield-related traits relative to control plants, wherein said method comprises the steps of modulating expression in said plant of a nucleic acid encoding a PAE1 polypeptide as described herein and optionally selecting for plants having one or more enhanced yield-related traits.

[0143] A preferred method for modulating, preferably increasing, expression of a nucleic acid encoding a PAE1 polypeptide is by introducing and expressing in a plant an isolated nucleic acid encoding a PAE1 polypeptide.

[0144] Any reference hereinafter to a “protein useful in the methods of the invention” is taken to mean a PAE1 polypeptide as defined herein. Any reference hereinafter to a “nucleic acid useful in the methods of the invention” is taken to mean a nucleic acid capable of encoding such a PAE1 polypeptide. In one embodiment any reference to a protein or nucleic acid “useful in the methods of the invention” is to be understood to mean proteins or nucleic acids “useful in the methods, constructs, plants, harvestable parts and products of the invention”. The isolated nucleic acid to be introduced into a plant (and therefore useful in performing the methods of the invention) is any nucleic acid encoding the type of protein which will now be described, hereafter also named “PAE1 nucleic acid” or “PAE1 gene”.

[0145] The terms “pectin acetylesterase polypeptide” or “PAE1 polypeptide” as given herein are all intended to include any polypeptide that is represented by SEQ ID NO: 2, or a homologue thereof having at least 25% overall sequence identity to SEQ ID NO: 2. Further, the “PAE1 polypeptide” as used and defined herein preferably comprises one or more motifs having in increasing order of preference at least 50% or more sequence identity to any one or more of the motifs 1 to 7D as provided in SEQ ID NO: 455 to SEQ ID NO: 464.

[0146] Preferably, a “PAE1 polypeptide” as defined herein refers to any polypeptide comprising a “G×S×G” motif (positions 188-192 in SEQ ID NO: 2) and an Asp residue (position 286 in SEQ ID NO: 2).

[0147] Analysis of PFAM matches for PAE1 (using program “hmmscan” from the HMMer3.0 software collection to search PFAM-A from PFAM release 26.0) shows that the PAE1 is related to entry PF03283 “Pectinacetylesterase”.

[0148] Further analysis of protein domains/families using InterProScan indicated that PAE1 is related to an alternative pectinacetyltransferase model (HMMPanther: PTHR21562:SF1 “PECTIN ACETYLESTERASE”).

[0149] According to one embodiment, there is provided a method for improving yield-related traits as provided herein in plants relative to control plants, comprising modulating, preferably increasing, expression in a plant of a nucleic acid encoding a PAE1 polypeptide as defined herein.

[0150] In one embodiment the PAE1 nucleic acid sequences employed in the methods, constructs, plants, harvestable parts and products of the invention are nucleic acid molecules selected from the group consisting of:
[0151] (i) a nucleic acid represented by SEQ ID NO: 1, SEQ ID NO: 466 or SEQ ID NO: 468;
[0152] (ii) the complement of a nucleic acid represented by SEQ ID NO: 1, SEQ ID NO: 466 or SEQ ID NO: 468;
[0153] (iii) a nucleic acid encoding a PAE1 polypeptide having in increasing order of preference at least 25%, 26%, 27%, 28%, 29%, 30%, 31%, 32%, 33%, 34%, 35%, 36%, 37%, 38%, 39%, 40%, 41%, 42%, 43%, 44%, 45%, 46%, 47%, 48%, 49%, 50%, 51%, 52%, 53%, 54%, 55%, 56%, 57%, 58%, 59%, 60%, 61%, 62%, 63%, 64%, 65%, 66%, 67%, 68%, 69%, 70%, 71%, 72%, 73%, 74%, 75%, 76%, 77%, 78%, 79%, 80%, 81%, 82%, 83%, 84%, 85%, 86%, 87%, 88%, 89%, 90%, 91%, 92%, 93%, 94%, 95%, 96%, 97%, 98%, or 99% sequence identity to the amino acid sequence represented by SEQ ID NO: 2 or SEQ ID NO: 467 and additionally or alternatively comprising one or more motifs having in increasing order of preference at least 50%, 55%, 60%, 65%, 70%, 75%, 80%, 85%, 90%, 95%, 96%, 97%, 98%, 99% or more sequence identity to any one or more of the motifs 1 to 7D as provided in SEQ ID NO: 455 to SEQ ID NO: 464, and further preferably conferring one or more enhanced yield-related traits relative to control plants; and
[0154] (iv) a nucleic acid molecule which hybridizes with a nucleic acid molecule of (i) to (iii) under high stringency hybridization conditions and preferably confers one or more enhanced yield-related traits relative to control plants;

[0155] Or are nucleic acid molecules that encode a polypeptide selected from the group consisting of:
[0156] (i) an amino acid sequence represented by SEQ ID NO: 2 or SEQ ID NO: 467;
[0157] (ii) an amino acid sequence having, in increasing order of preference, at least 25%, 26%, 27%, 28%, 29%, 30%, 31%, 32%, 33%, 34%, 35%, 36%, 37%, 38%, 39%, 40%, 41%, 42%, 43%, 44%, 45%, 46%, 47%, 48%, 49%, 50%, 51%, 52%, 53%, 54%, 55%, 56%, 57%, 58%, 59%, 60%, 61%, 62%, 63%, 64%, 65%, 66%, 67%, 68%, 69%, 70%, 71%, 72%, 73%, 74%, 75%, 76%, 77%, 78%, 79%, 80%, 81%, 82%, 83%, 84%, 85%, 86%, 87%, 88%, 89%, 90%, 91%, 92%, 93%, 94%, 95%, 96%, 97%, 98%, or 99% sequence identity to the amino acid sequence represented by SEQ ID NO: 2 or SEQ ID NO: 467, and additionally or alternatively comprising one or more motifs having in increasing order of preference at least 50%, 55%, 60%, 65%, 70%, 75%, 80%, 85%, 90%, 95%, 96%, 97%, 98%, 99% or more sequence identity to any one or more of the motifs 1 to 7D as provided in SEQ ID NO: 455 to SEQ ID NO: 464, and further preferably conferring one or more enhanced yield-related traits relative to control plants; and
[0158] (iii) derivatives of any of the amino acid sequences given in (i) or (ii) above.

[0159] Preferably the polypeptide comprises one or more motifs and/or domains as defined elsewhere herein.

[0160] Motifs 1 to 7D as provided in SEQ ID NO: 455 to SEQ ID NO: 464 were derived using the MEME algorithm (Bailey and Elkan, Proceedings of the Second International Conference on Intelligent Systems for Molecular Biology, pp. 28-36, AAAI Press, Menlo Park, Calif., 1994). At each position within a MEME motif, the residues are shown that are present in the query set of sequences with a frequency higher than 0.2. Residues within square brackets represent alternatives.

[0161] In one embodiment, the PAE1 polypeptide as used herein comprises at least one of the motifs 1, 2, 3, 4, 5, 6, 7A, 7B, 7C or 7D as provided in SEQ ID NO: 455 to SEQ ID NO: 464.

Motif 1 (SEQ ID NO: 455):
P-D-F-[FHY]-x-W-N-[KR]-[IV]-K-[GILV]-R-Y-C
Motif 2 (SEQ ID NO: 456):
A-[FV]-C-L-D-G-[ST]-[ALPV]-P-[AGV]-Y-H-x(3)-G-x-G-
[ADEST]-G
Motif 3 (SEQ ID NO: 457):
F-P-Q-x(2)-[AILV]-x(2)-[ILMV]-x-T-P-x-F-[FILV]-
[ILV]-N-[AGPST]-[AGP]-x-D-x(2)-Q
Motif 4 (SEQ ID NO: 458):
W-[ILV]-[ILV]-x-[FILM]-E-G-G-G-W-C-x-[DNST]-x(2)-
[ADENST]-C-x(2)-[RS]
Motif 5 (SEQ ID NO: 459):
V-K-C-[FLMV]-[APS]-D-A-G-x-F-[FILMV]-x(3)-[ADSV]
Motif 6 (SEQ ID NO: 460):
R-G-x-[KR]-[IV]-[FWY]-x-A-[AGIV]-x(3)-L
Motif 7A (SEQ ID NO: 461):
D-G-[AGS]-S-F-[ADGST]-G-D
Motif 7B (SEQ ID NO: 462):
D-G-[AGS]-S-F-[ADGST]-G-x(1)-D
Motif 7C (SEQ ID NO: 463):
D-G-[AGS]-S-F-[ADGST]-G-x(2)-D
Motif 7D (SEQ ID NO: 464):
D-G-[AGS]-S-F-[ADGST]-G-x(3)-D

[0162] In still another embodiment, the PAE1 polypeptide comprises in increasing order of preference, at least 2, at least 3, at least 4, at least 5, at least 6, or all 7 motifs as defined above.

[0163] In one preferred embodiment, the PAE1 polypeptide comprises one or more motifs selected from Motif 1, Motif 2, and Motif 3. Preferably, the PAE1 polypeptide comprises Motifs 1 and 2, or Motifs 2 and 3, or Motifs 1 and 3, or Motifs 1, 2 and 3.

[0164] Additionally or alternatively, the PAE1 protein has in increasing order of preference at least 25%, 26%, 27%, 28%, 29%, 30%, 31%, 32%, 33%, 34%, 35%, 36%, 37%, 38%, 39%, 40%, 41%, 42%, 43%, 44%, 45%, 46%, 47%, 48%, 49%, 50%, 51%, 52%, 53%, 54%, 55%, 56%, 57%, 58%, 59%, 60%, 61%, 62%, 63%, 64%, 65%, 66%, 67%, 68%, 69%, 70%, 71%, 72%, 73%, 74%, 75%, 76%, 77%, 78%, 79%, 80%, 81%, 82%, 83%, 84%, 85%, 86%, 87%, 88%, 89%, 90%, 91%, 92%, 93%, 94%, 95%, 96%, 97%, 98%, or 99% overall sequence identity to the amino acid sequence represented by SEQ ID NO: 2 or SEQ ID NO: 467, provided that the homologous protein comprises any one or more of the conserved motifs as outlined above. The overall sequence identity is determined using a global alignment algorithm, such as the Needleman Wunsch algorithm in the program GAP (GCG Wisconsin Package, Accelrys), preferably with default parameters and preferably with sequences of mature proteins (i.e. without taking into account secretion signals or transit peptides). In one embodiment the sequence identity level is determined by comparison of the polypeptide sequences over the entire length of the sequence of SEQ ID NO: 2 or SEQ ID NO: 467. Alternatively the sequence identity is determined by comparison of a nucleic acid sequence to the sequence encoding the protein in SEQ ID NO: 1, SEQ ID NO: 466 or SEQ ID NO: 468.

[0165] In another embodiment, the sequence identity level is determined by comparison of one or more conserved domains or motifs in SEQ ID NO: 2 or SEQ ID NO: 467 with corresponding conserved domains or motifs in other PAE1 polypeptides. Compared to overall sequence identity, the sequence identity will generally be higher when only conserved domains or motifs are considered.

[0166] Preferably the motifs in a PAE1 polypeptide have, in increasing order of preference, at least 50%, 51%, 52%, 53%, 54%, 55%, 56%, 57%, 58%, 59%, 60%, 61%, 62%, 63%, 64%, 65%, 66%, 67%, 68%, 69%, 70%, 71%, 72%, 73%, 74%, 75%, 76%, 77%, 78%, 79%, 80%, 81%, 82%, 83%, 84%, 85%, 86%, 87%, 88%, 89%, 90%, 91%, 92%, 93%, 94%, 95%, 96%, 97%, 98%, or 99% sequence identity to any one or more of the motifs 1 to 7D as provided in SEQ ID NO: 455 to SEQ ID NO: 464. In other words, in another embodiment a method for enhancing one or more yield-related traits in plants is provided wherein said PAE1 polypeptide comprises a conserved domain (or motif) with at least 50%, 51%, 52%, 53%, 54%, 55%, 56%, 57%, 58%, 59%, 60%, 61%, 62%, 63%, 64%, 65%, 66%, 67%, 68%, 69%, 70%, 71%, 72%, 73%, 74%, 75%, 76%, 77%, 78%, 79%, 80%, 81%, 82%, 83%, 84%, 85%, 86%, 87%, 88%, 89%, 90%, 91%, 92%, 93%, 94%, 95%, 96%, 97%, 98%, or 99% sequence identity to one or more of the conserved domains starting with amino acid 129 up to amino acid 142 in SEQ ID NO:2, amino acid 58 up to amino acid 77 in SEQ ID NO:2, amino acid 266 up to amino acid 289 in SEQ ID NO:2, amino acid 81 up to amino acid 100 in SEQ ID NO:2, amino acid 213 up to amino acid 227 in SEQ ID NO:2, amino acid 161 up to amino acid 173 in SEQ ID NO:2, and amino acid 143 up to amino acid 153 in SEQ ID NO:2.

[0167] The terms “domain”, “signature” and “motif” are defined in the “definitions” section herein.

[0168] Nucleic acids encoding PAE1 polypeptides, when expressed in rice according to the methods of the present invention as outlined in Examples 7 and 9, give plants having increased yield related traits, in particular leafy biomass, emergence vigor, root biomass, seed yield per plant, number of florets per plant, proportion of filled seeds and harvest index. Another function of the nucleic acid sequences encoding PAE1 polypeptides is to confer information for synthesis of the PAE1 polypeptide that increases yield or yield related traits as described herein, when such a nucleic acid sequence of the invention is transcribed and translated in a living plant cell.

[0169] Examples of nucleic acids encoding PAE1 polypeptides are given in Table A of the Examples section herein. Such nucleic acids are useful in performing the methods of the invention. The amino acid sequences given in Table A of the Examples section are example sequences of orthologues and paralogues of the PAE1 polypeptide represented by SEQ ID NO: 2, the terms “orthologues” and “paralogues” being as defined herein. Further orthologues and paralogues may readily be identified by performing a so-called reciprocal blast search as described in the definitions section; where the query sequence is SEQ ID NO: 1 or SEQ ID NO: 2, the second BLAST (back-BLAST) would be against rice sequences.

[0170] With respect to the sequences of the invention, a nucleic acid or a polypeptide sequence of plant origin has the characteristic of a codon usage optimised for expression in plants, and of the use of amino acids and regulatory sites common in plants, respectively. The plant of origin may be any plant, but preferably those plants as described in the previous paragraph.

[0171] The invention also provides PAE1-encoding nucleic acids and PAE1 polypeptides useful in the methods, constructs, plants, harvestable parts and products of the invention.

[0172] The invention also provides hitherto unknown PAE1-encoding nucleic acids and PAE1 polypeptides useful for conferring one or more enhanced yield-related traits in plants relative to control plants.

[0173] According to a further embodiment of the present invention, there is therefore provided an isolated nucleic acid molecule selected from the group consisting of:
[0174] (i) a nucleic acid represented by SEQ ID NO: 1;
[0175] (ii) the complement of a nucleic acid represented by SEQ ID NO: 1;
[0176] (iii) a nucleic acid encoding a PAE1 polypeptide having in increasing order of preference at least 25%, 26%, 27%, 28%, 29%, 30%, 31%, 32%, 33%, 34%, 35%, 36%, 37%, 38%, 39%, 40%, 41%, 42%, 43%, 44%, 45%, 46%, 47%, 48%, 49%, 50%, 51%, 52%, 53%, 54%, 55%, 56%, 57%, 58%, 59%, 60%, 61%, 62%, 63%, 64%, 65%, 66%, 67%, 68%, 69%, 70%, 71%, 72%, 73%, 74%, 75%, 76%, 77%, 78%, 79%, 80%, 81%, 82%, 83%, 84%, 85%, 86%, 87%, 88%, 89%, 90%, 91%, 92%, 93%, 94%, 95%, 96%, 97%, 98%, or 99% sequence identity to the amino acid sequence represented by SEQ ID NO: 2 and additionally or alternatively comprising one or more motifs having in increasing order of preference at least 50%, 55%, 60%, 65%, 70%, 75%, 80%, 85%, 90%, 95%, 96%, 97%, 98%, 99% or more sequence identity to any one or more of the motifs 1 to 7D as provided in SEQ ID NO: 455 to SEQ ID NO: 464, and further preferably conferring one or more enhanced yield-related traits relative to control plants; and
[0177] (iv) a nucleic acid molecule which hybridizes with a nucleic acid molecule of (i) to (iii) under high stringency hybridization conditions and preferably confers one or more enhanced yield-related traits relative to control plants.

[0178] According to a further embodiment of the present invention, there is also provided an isolated polypeptide selected from the group consisting of:
[0179] (i) an amino acid sequence represented by SEQ ID NO: 2;
[0180] (ii) an amino acid sequence having, in increasing order of preference, at least 25%, 26%, 27%, 28%, 29%, 30%, 31%, 32%, 33%, 34%, 35%, 36%, 37%, 38%, 39%, 40%, 41%, 42%, 43%, 44%, 45%, 46%, 47%, 48%, 49%, 50%, 51%, 52%, 53%, 54%, 55%, 56%, 57%, 58%, 59%, 60%, 61%, 62%, 63%, 64%, 65%, 66%, 67%, 68%, 69%, 70%, 71%, 72%, 73%, 74%, 75%, 76%, 77%, 78%, 79%, 80%, 81%, 82%, 83%, 84%, 85%, 86%, 87%, 88%, 89%, 90%, 91%, 92%, 93%, 94%, 95%, 96%, 97%, 98%, or 99% sequence identity to the amino acid sequence represented by SEQ ID NO: 2, and additionally or alternatively comprising one or more motifs having in increasing order of preference at least 50%, 55%, 60%, 65%, 70%, 75%, 80%, 85%, 90%, 95%, 96%, 97%, 98%, 99% or more sequence identity to any one or more of the motifs 1 to 7D as provided in SEQ ID NO: 455 to SEQ ID NO: 464, and further preferably conferring one or more enhanced yield-related traits relative to control plants; and
[0181] (iii) derivatives of any of the amino acid sequences given in (i) or (ii) above.

[0182] Nucleic acid variants may also be useful in practising the methods of the invention. Examples of such variants include nucleic acids encoding homologues and derivatives of any one of the amino acid sequences given in Table A of the Examples section, the terms “homologue” and “derivative” being as defined herein. Also useful in the methods, constructs, plants, harvestable parts and products of the invention are nucleic acids encoding homologues and derivatives of orthologues or paralogues of any one of the amino acid sequences given in Table A of the Examples section. Homologues and derivatives useful in the methods of the present invention have substantially the same biological and functional activity as the unmodified protein from which they are derived. Further variants useful in practising the methods of the invention are variants in which codon usage is optimised or in which miRNA target sites are removed.

[0183] Further nucleic acid variants useful in practising the methods of the invention include portions of nucleic acids encoding PAE1 polypeptides, nucleic acids hybridising to nucleic acids encoding PAE1 polypeptides, splice variants of nucleic acids encoding PAE1 polypeptides, allelic variants of nucleic acids encoding PAE1 polypeptides and variants of nucleic acids encoding PAE1 polypeptides obtained by gene shuffling. The terms hybridising sequence, splice variant, allelic variant and gene shuffling are as described herein.

[0184] Nucleic acids encoding PAE1 polypeptides need not be full-length nucleic acids, since performance of the methods of the invention does not rely on the use of full-length nucleic acid sequences. According to the present invention, there is provided a method for enhancing one or more yield-related traits in plants, comprising introducing, preferably by recombinant methods, and expressing in a plant a portion of any one of the nucleic acid sequences given in Table A of the Examples section, or a portion of a nucleic acid encoding an orthologue, paralogue or homologue of any of the amino acid sequences given in Table A of the Examples section.

[0185] A portion of a nucleic acid may be prepared, for example, by making one or more deletions to the nucleic acid. The portions may be used in isolated form or they may be fused to other coding (or non-coding) sequences in order to, for example, produce a protein that combines several activities. When fused to other coding sequences, the resultant polypeptide produced upon translation may be bigger than that predicted for the protein portion.

[0186] Portions useful in the methods, constructs, plants, harvestable parts and products of the invention, encode a PAE1 polypeptide as defined herein or at least part thereof, and have substantially the same biological activity as the amino acid sequences given in Table A of the Examples section. Preferably, the portion is a portion of any one of the nucleic acids given in Table A of the Examples section, or is a portion of a nucleic acid encoding an orthologue or paralogue of any one of the amino acid sequences given in Table A of the Examples section.

[0187] Preferably the portion is at least 500, 550, 600, 650, 700, 750, 800, 850, 900, 950, 1000 1050, 1100, 1150, 1200, 1250, 1300, 1350, 1400, 1450, 1500, 1550, 1600, 1650, 1700, 1750, 1800, 1850, 1900, 1950, 2000 consecutive nucleotides in length, the consecutive nucleotides being of any one of the nucleic acid sequences given in Table A of the Examples section, or of a nucleic acid encoding an orthologue or paralogue of any one of the amino acid sequences given in Table A of the Examples section. Most preferably the portion is a portion of the nucleic acid of SEQ ID NO: 1.

[0188] Another nucleic acid variant useful in the methods, constructs, plants, harvestable parts and products of the invention is a nucleic acid capable of hybridising, under reduced stringency conditions, preferably under stringent conditions, with a nucleic acid encoding a PAE1 polypeptide as defined herein, or with a portion as defined herein. According to the present invention, there is provided a method for enhancing one or more yield-related traits in plants, comprising introducing, preferably by recombinant methods, and expressing in a plant a nucleic acid capable of hybridizing to the complement of a nucleic acid encoding any one of the proteins given in Table A of the Examples section, or to the complement of a nucleic acid encoding an orthologue, paralogue or homologue of any one of the proteins given in Table A.

[0189] Hybridising sequences useful in the methods, constructs, plants, harvestable parts and products of the invention encode a PAE1 polypeptide as defined herein, having substantially the same biological activity as the amino acid sequences given in Table A of the Examples section. Preferably, the hybridising sequence is capable of hybridising to the complement of a nucleic acid encoding any one of the proteins given in Table A of the Examples section, or to a portion of any of these sequences, a portion being as defined herein, or the hybridising sequence is capable of hybridising to the complement of a nucleic acid encoding an orthologue or paralogue of any one of the amino acid sequences given in Table A of the Examples section. Most preferably, the hybridising sequence is capable of hybridising to the complement of a nucleic acid encoding the polypeptide as represented by SEQ ID NO: 2 or to a portion thereof. In one embodiment, the hybridization conditions are of medium stringency, preferably of high stringency, as defined herein.

[0190] Preferably, the hybridising sequence encodes a polypeptide with an amino acid sequence which comprises motifs 1 to 7 (wherein motif 7 is selected from one of motifs 7A to 7D) as provided in SEQ ID NO: 455 to SEQ ID NO: 464, and/or has acetylesterase activity, and/or has at least 25% sequence identity to SEQ ID NO: 2.

[0191] In another embodiment, there is provided a method for enhancing one or more yield-related traits in plants, comprising introducing, preferably by recombinant methods, and expressing in a plant a splice variant of a nucleic acid encoding any one of the proteins given in Table A of the Examples section, or a splice variant of a nucleic acid encoding an orthologue, paralogue or homologue of any of the amino acid sequences given in Table A of the Examples section.

[0192] Preferred splice variants are splice variants of a nucleic acid represented by SEQ ID NO: 1, or a splice variant of a nucleic acid encoding an orthologue or paralogue of SEQ ID NO: 2. Preferably, the amino acid sequence encoded by the splice variant comprises motifs 1 to 7 (wherein motif 7 is selected from one of motifs 7A to 7D) as provided in SEQ ID NO: 455 to SEQ ID NO: 464, and/or has acetylesterase activity, and/or has at least 25% sequence identity to SEQ ID NO: 2.

[0193] In yet another embodiment, there is provided a method for enhancing one or more yield-related traits in plants, comprising introducing, preferably by recombinant methods, and expressing in a plant an allelic variant of a nucleic acid encoding any one of the proteins given in Table A of the Examples section, or comprising introducing, preferably by recombinant methods, and expressing in a plant an allelic variant of a nucleic acid encoding an orthologue, paralogue or homologue of any of the amino acid sequences given in Table A of the Examples section.

[0194] The polypeptides encoded by allelic variants useful in the methods of the present invention have substantially the same biological activity as the PAE1 polypeptide of SEQ ID NO: 2 and any of the amino acid sequences depicted in Table A of the Examples section. Allelic variants exist in nature, and encompassed within the methods of the present invention is the use of these natural alleles. Preferably, the allelic variant is an allelic variant of SEQ ID NO: 1 or an allelic variant of a nucleic acid encoding an orthologue or paralogue of SEQ ID NO: 2. Preferably, the amino acid sequence encoded by the allelic variant comprises one or more of the motifs 1 to 7D as provided in SEQ ID NO: 455 to SEQ ID NO: 464 and as defined herein, and/or has acetylesterase activity, and/or has at least 25% sequence identity to SEQ ID NO: 2.

[0195] In yet another embodiment, there is provided a method for enhancing one or more yield-related traits in plants, comprising introducing, preferably by recombinant methods, and expressing in a plant a variant of a nucleic acid encoding any one of the proteins given in Table A of the Examples section, or comprising introducing, preferably by recombinant methods, and expressing in a plant a variant of a nucleic acid encoding an orthologue, paralogue or homologue of any of the amino acid sequences given in Table A of the Examples section, which variant nucleic acid is obtained by gene shuffling.

[0196] Preferably, the amino acid sequence encoded by the variant nucleic acid obtained by gene shuffling comprises one or more of the motifs 1 to 7D as defined herein, and/or has acetylesterase activity, and/or has at least 25% sequence identity to SEQ ID NO: 2.

[0197] Furthermore, nucleic acid variants may also be obtained by site-directed mutagenesis. Several methods are available to achieve site-directed mutagenesis, the most common being PCR based methods (Current Protocols in Molecular Biology. Wiley Eds.). PAE1 polypeptides differing from the sequence of SEQ ID NO: 2 by one or several amino acids (substitution(s), insertion(s) and/or deletion(s) as defined herein) may equally be useful to increase the yield of plants in the methods and constructs and plants of the invention. Nucleic acids encoding PAE1 polypeptides may be derived from any natural or artificial source. The nucleic acid may be modified from its native form in composition and/or genomic environment through deliberate human manipulation. Preferably the PAE1 polypeptide-encoding nucleic acid is from a plant, further preferably from a monocotyledonous plant, more preferably from the family Poaceae, most preferably the nucleic acid is from Oryza sativa.

[0198] The inventive methods for enhancing one or more yield-related traits in plants as described herein comprising introducing, preferably by recombinant methods, and expressing in a plant the nucleic acid(s) as defined herein, and preferably the further step of growing the plants and optionally the step of harvesting the plants or part(s) thereof.

[0199] In another embodiment the present invention extends to recombinant chromosomal DNA comprising a nucleic acid sequence useful in the methods of the invention, wherein said nucleic acid is present in the chromosomal DNA as a result of recombinant methods, but is not in its natural genetic environment. In a further embodiment the recombinant chromosomal DNA of the invention is comprised in a plant cell. DNA comprised within a cell, particularly a cell with cell walls like a plant cell, is better protected from degradation, damage and/or breakdown than a bare nucleic acid sequence. The same holds true for a DNA construct comprised in a host cell, for example a plant cell.

[0200] In a preferred embodiment the invention relates to compositions comprising the recombinant chromosomal DNA of the invention and/or the construct of the invention, and a host cell, preferably a plant cell, wherein the recombinant chromosomal DNA and/or the construct are comprised within the host cell, preferably within a plant cell or a host cell with a cell wall. In a further embodiment said composition comprises dead host cells, living host cells or a mixture of dead and living host cells, wherein the recombinant chromosomal DNA and/or the construct of the invention may be located in dead host cells and/or living host cell. Optionally the composition may comprise further host cells that do not comprise the recombinant chromosomal DNA of the invention or the construct of the invention. The compositions of the invention may be used in processes of multiplying or distributing the recombinant chromosomal DNA and/or the construct of the invention, and or alternatively to protect the recombinant chromosomal DNA and/or the construct of the invention from breakdown and/or degradation as explained herein above. The recombinant chromosomal DNA of the invention and/or the construct of the invention can be used as a quality marker of the compositions of the invention, as an indicator of origin and/or as an indication of producer.

[0201] In particular, the methods of the present invention may be performed under non-stress conditions. In an example, the methods of the present invention may be performed under non-stress conditions such as mild drought to give plants having increased yield relative to control plants.

[0202] In another embodiment, the methods of the present invention may be performed under stress conditions, preferably under abiotic stress conditions.

[0203] In an example, the methods of the present invention may be performed under stress conditions such as drought to give plants having increased yield relative to control plants.

[0204] In another example, the methods of the present invention may be performed under stress conditions such as nutrient deficiency to give plants having increased yield relative to control plants.

[0205] Nutrient deficiency may result from a lack of nutrients such as nitrogen, phosphates and other phosphorous-containing compounds, potassium, calcium, magnesium, manganese, iron and boron, amongst others.

[0206] In yet another example, the methods of the present invention may be performed under stress conditions such as salt stress to give plants having increased yield relative to control plants. The term salt stress is not restricted to common salt (NaCl), but may be any one or more of: NaCl, KCl, LiCl, MgCl2, CaCl2, amongst others.

[0207] In yet another example, the methods of the present invention may be performed under stress conditions such as cold stress or freezing stress to give plants having increased yield relative to control plants.

[0208] In a preferred embodiment the methods of the invention are performed using plants in need of increased abiotic stress-tolerance for example tolerance to drought, salinity and/or cold or hot temperatures and/or nutrient use due to one or more nutrient deficiency such as nitrogen deficiency.

[0209] Performance of the methods of the invention gives plants having one or more enhanced yield-related traits. In particular performance of the methods of the invention gives plants having increased biomass (including aboveground biomass and belowground biomass), early vigour (early vigour may be used interchangeably with the term “emergence vigour”), seed yield per plant, number of florets per plant, proportion of filled seeds (seed filling rate) and harvest index relative to control plants. The terms “biomass, early vigour, seed yield per plant, number of florets per plant, seed filling rate and harvest index” are described in more detail in the “definitions” section herein.

[0210] In one embodiment, there is provided a method for enhancing one or more yield-related traits in plants. Preferably, said yield-related traits comprise increased yield relative to control plants, and preferably comprises increased biomass and/or increased seed yield relative to control plants. In an embodiment, said increased biomass relates to an increase in one or more of the following traits: aboveground biomass (AreaMax), including shoot biomass, seed biomass, leaf biomass, stem biomass, sett biomass and maximum height (HeightMax); belowground biomass, including root biomass (RootMax), tubers and bulbs; and said increased seed yield relates to an increase in one or more of the following traits: total weight of seeds, number of seeds, fill rate, harvest index, the number of panicles in the first flush (FirstPan), number of filled seeds of a plant (nrfilledseed; counted by Quetzal) and the height (in mm) of the gravity centre of the leafy biomass, based on the absolute maximum (GravityYMax).

[0211] The present invention thus provides a method for increasing biomass (including aboveground biomass and belowground biomass), early vigour, number of florets per plant, proportion of filled seeds (seed filling rate), harvest index, and especially seed yield of plants, relative to control plants, which method comprises modulating expression, preferably increasing expression, in a plant of a nucleic acid encoding a PAE1 polypeptide as defined herein.

[0212] According to a preferred feature of the present invention, performance of the methods of the invention gives plants having an increased growth rate relative to control plants. Therefore, according to the present invention, there is provided a method for increasing the growth rate of plants, which method comprises modulating, preferably increasing, expression in a plant of a nucleic acid encoding a PAE1 polypeptide as defined herein.

[0213] Performance of the methods of the invention results in plants having increased seed yield relative to the seed yield of control plants, and/or increased aboveground biomass, in particular stem biomass relative to the aboveground biomass, and in particular stem biomass of control plants, and/or increased root biomass relative to the root biomass of control plants and/or increased beet biomass relative to the beet biomass of control plants. Moreover, it is particularly contemplated that the sugar content (in particular the sucrose content) in the above ground parts, particularly stem (in particular of sugar cane plants) and/or in the belowground parts, in particular in roots including taproots and tubers, and/or in beets (in particular in sugar beets) is increased relative to the sugar content (in particular the sucrose content) in corresponding part(s) of the control plant.

[0214] In one embodiment of the invention, root biomass is increased, preferably beet and/or taproot biomass, more preferably in sugar beet plants, and optionally seed yield and/or above ground biomass are not increased.

[0215] In another embodiment of the invention, above ground biomass is increased, preferably stem, stalk and/or sett biomass, more preferably in Poaceae, even more preferably in a Saccharum species, most preferably in sugarcane, and optionally seed yield, belowground biomass and/or root growth is not increased.

[0216] In a further embodiment the total harvestable sugar, preferably glucose, fructose and/or sucrose, is increased, preferably in addition to increased other yield-related traits as defined herein, for example biomass, and more preferably also in addition to an increase in sugar content, preferably glucose, fructose and/or sucrose content.

[0217] The invention also provides genetic constructs and vectors to facilitate introduction and/or expression in plants of nucleic acids encoding PAE1 polypeptides. The gene constructs may be inserted into vectors, which may be commercially available, suitable for transforming into plants or host cells and suitable for expression of the gene of interest in the transformed cells. The invention also provides use of a gene construct as defined herein in the methods of the invention.

[0218] More specifically, the present invention provides a construct comprising:
[0219] (a) an isolated nucleic acid encoding a PAE1 polypeptide as defined above;
[0220] (b) one or more control sequences capable of driving expression of the nucleic acid sequence of (a); and optionally
[0221] (c) a transcription termination sequence.

[0222] Preferably, the nucleic acid encoding a PAE1 polypeptide is as defined above. The term “control sequence” and “termination sequence” are as defined herein.

[0223] In particular the genetic construct of the invention is a plant expression construct, i.e. a genetic construct that allows for the expression of the nucleic acid encoding a PAE1 polypeptide in a plant, plant cell or plant tissue after the construct has been introduced into this plant, plant cell or plant tissue, preferably by recombinant means. The plant expression construct may for example comprise said nucleic acid encoding a PAE1 polypeptide in functional linkage to a promoter and optionally other control sequences controlling the expression of said nucleic acid in one or more plant cells, wherein the promoter and optional the other control sequences are not natively found in functional linkage to said nucleic acid. In a preferred embodiment the control sequence(s) including the promoter result in overexpression of said nucleic acid when the construct of the invention has been introduced into a plant, plant cell or plant tissue.

[0224] The genetic construct of the invention may be comprised in a host cell—for example a plant cell—seed, agricultural product or plant. Plants or host cells are transformed with a genetic construct such as a vector or an expression cassette comprising any of the nucleic acids described above. Thus the invention furthermore provides plants or host cells transformed with a construct as described above. In particular, the invention provides plants transformed with a construct as described above, which plants have increased yield-related traits as described herein.

[0225] In one embodiment the genetic construct of the invention confers increased yield or yield related traits(s) to a plant when it has been introduced into said plant, which plant expresses the nucleic acid encoding the PAE1 polypeptide comprised in the genetic construct and preferably resulting in increased abundance of the PAE1 polypeptide. In another embodiment the genetic construct of the invention confers increased yield or yield related traits(s) to a plant comprising plant cells in which the construct has been introduced, which plant cells express the PAE1 nucleic acid comprised in the genetic construct. The promoter in such a genetic construct may be a promoter not native to the nucleic acid described above, i.e. a promoter different from the promoter regulating the expression of the PAE1 nucleic acid in its native surrounding.

[0226] In a particular embodiment the nucleic acid encoding the PAE1 polypeptide useful in the methods, constructs, plants, harvestable parts and products of the invention is in functional linkage to a promoter resulting in the expression of the PAE1 nucleic acid in
[0227] aboveground biomass preferably the leaves and shoot, more preferably the stem, of monocot plants, preferably Poaceae plants, more preferably Saccharum species plants, AND/OR
[0228] leaves, belowground biomass and/or root biomass, preferably tubers, taproots and/or beet organs, more preferably taproot and beet organs of dicot plants, more preferably Solanaceae and/or Beta species plants.

[0229] The expression cassette or the genetic construct of the invention may be comprised in a host cell, plant cell, seed, agricultural product or plant.

[0230] The skilled artisan is well aware of the genetic elements that must be present on the genetic construct in order to successfully transform, select and propagate host cells containing the sequence of interest. The sequence of interest is operably linked to one or more control sequences (at least to a promoter).

[0231] Advantageously, any type of promoter, whether natural or synthetic, may be used to drive expression of the nucleic acid sequence, but preferably the promoter is of plant origin. A constitutive promoter is particularly useful in the methods. See the “Definitions” section herein for definitions of the various promoter types. Also useful in the methods of the invention is a root-specific promoter.

[0232] The constitutive promoter is preferably a ubiquitous constitutive promoter of medium strength. More preferably it is a plant derived promoter, e.g. a promoter of plant chromosomal origin, such as a GOS2 promoter or a promoter of substantially the same strength and having substantially the same expression pattern (a functionally equivalent promoter), more preferably the promoter is the GOS2 promoter from rice. Further preferably the constitutive promoter is represented by a nucleic acid sequence substantially similar to SEQ ID NO: 469, most preferably the constitutive promoter is as represented by SEQ ID NO: 469. See the “Definitions” section herein for further examples of constitutive promoters.

[0233] According to another preferred embodiment of the invention, the nucleic acid encoding a PAE1 polypeptide is operably linked to a root-specific promoter. The root-specific promoter is preferably an RCc3 promoter (Plant Mol Biol. 1995 January; 27(2):237-48) or a promoter of substantially the same strength and having substantially the same expression pattern (a functionally equivalent promoter), more preferably the RCc3 promoter is from rice. Examples of other root-specific promoters which may also be used to perform the methods of the invention are shown in Table 2b in the “Definitions” section.

[0234] It should be clear that the applicability of the present invention is not restricted to the PAE1 polypeptide-encoding nucleic acid represented by SEQ ID NO: 1, nor is the applicability of the invention restricted to the rice GOS2 promoter when expression of a PAE1 polypeptide-encoding nucleic acid is driven by a constitutive promoter.

[0235] Yet another embodiment relates to genetic constructs useful in the methods, constructs, plants, harvestable parts and products of the invention wherein the genetic construct comprises the PAE1 nucleic acid of the invention functionally linked a promoter as disclosed herein above and further functionally linked to one or more of
[0236] 1) nucleic acid expression enhancing nucleic acids (NEENAs):
   [0237] a) as disclosed in the international patent application published as WO 2011/023537 in table 1 on page 27 to page 28 and/or SEQ ID NO: 1 to 19 and/or as defined in items i) to vi) of claim 1 of said international application which NEENAs are herewith incorporated by reference; and/or
   [0238] b) as disclosed in the international patent application published as WO 2011/023539 in table 1 on page 27 and/or SEQ ID NO: 1 to 19 and/or as defined in items i) to vi) of claim 1 of said international application which NEENAs are herewith incorporated by reference; and/or
   [0239] c) as contained in or disclosed in:
      [0240] i) the European priority application filed on 5 Jul. 2011 as EP 11172672.5 in table 1 on page 27 and/or SEQ ID NO: 1 to 14937, preferably SEQ ID NO: 1 to 5, 14936 or 14937, and/or as defined in items i) to v) of claim 1 of said European priority application which NEENAs are herewith incorporated by reference; and/or
      [0241] ii) the European priority application filed on 6 Jul. 2011 as EP 11172825.9 in table 1 on page 27 and/or SEQ ID NO: 1 to 65560, preferably SEQ ID NO: 1 to 3, and/or as defined in items i) to v) of claim 1 of said European priority application which NEENAs are herewith incorporated by reference;
         [0242] and/or
   [0243] d) equivalents having substantially the same enhancing effect; and/or
[0244] 2) functionally linked to one or more Reliability Enhancing Nucleic Acid (RENA) molecule
   [0245] a) as contained in or disclosed in the European priority application filed on 15 Sep. 2011 as EP 11181420.8 in table 1 on page 26 and/or SEQ ID NO: 1 to 16 or 94 to 116666, preferably SEQ ID NO: 1 to 16, and/or as defined in point i) to v) of item a) of claim 1 of said European priority application which RENA molecule(s) are herewith incorporated by reference; or
   [0246] b) equivalents having substantially the same enhancing effect.

[0247] A preferred embodiment of the invention relates to a nucleic acid molecule useful in the methods, constructs, plants, harvestable parts and products of the invention and encoding a PAE1 polypeptide of the invention under the control of a promoter as described herein above, wherein the NEENA, RENA and/or the promoter is heterologous to the PAE1 nucleic acid molecule of the invention.

[0248] Optionally, one or more terminator sequences may be used in the construct introduced into a plant. Those skilled in the art will be aware of terminator sequences that may be suitable for use in performing the invention. Preferably, the construct comprises an expression cassette comprising a GOS2 promoter, substantially similar to SEQ ID NO: 469, operably linked to the nucleic acid encoding the PAE1 polypeptide. More preferably, the construct furthermore comprises a zein terminator (t-zein) linked to the 3′ end of the PAE1 coding sequence.

[0249] According to a preferred feature of the invention, the modulated expression is increased expression. Methods for increasing expression of nucleic acids or genes, or gene products, are well documented in the art and examples are provided in the definitions section.

[0250] As mentioned above, a preferred method for modulating expression of a nucleic acid encoding a PAE1 polypeptide is by introducing, preferably by recombinant methods, and expressing in a plant a nucleic acid encoding a PAE1 polypeptide; however the effects of performing the method, i.e. enhancing one or more yield-related traits may also be achieved using other well-known techniques, including but not limited to T-DNA activation tagging, TILLING, homologous recombination. A description of these techniques is provided in the definitions section.

[0251] The invention also provides a method for the production of transgenic plants having one or more enhanced yield-related traits relative to control plants, comprising introduction and expression in a plant of any nucleic acid encoding a PAE1 polypeptide as defined herein.

[0252] More specifically, the present invention provides a method for the production of transgenic plants having one or more enhanced yield-related traits, as defined herein, particularly increased seed yield and or biomass, which method comprises:
[0253] (i) introducing and expressing in a plant or plant cell a recombinant PAE1 polypeptide-encoding nucleic acid or a genetic construct comprising a PAE1 polypeptide-encoding nucleic acid; and
[0254] (ii) cultivating the plant cell under conditions promoting plant growth and development.

[0255] Preferably, the introduction of the PAE1 polypeptide-encoding nucleic acid is by recombinant methods.

[0256] The nucleic acid of (i) may be any of the nucleic acids capable of encoding a PAE1 polypeptide as defined herein.

[0257] Cultivating the plant cell under conditions promoting plant growth and development, may or may not include regeneration and/or growth to maturity. Accordingly, in a particular embodiment of the invention, the plant cell transformed by the method according to the invention is regenerable into a transformed plant. In another particular embodiment, the plant cell transformed by the method according to the invention is not regenerable into a transformed plant, i.e. cells that are not capable to regenerate into a plant using cell culture techniques known in the art. While plants cells generally have the characteristic of totipotency, some plant cells cannot be used to regenerate or propagate intact plants from said cells. In one embodiment of the invention the plant cells of the invention are such cells. In another embodiment the plant cells of the invention are plant cells that do not sustain themselves in an autotrophic way. One example are plant cells that do not sustain themselves through photosynthesis by synthesizing carbohydrate and protein from such inorganic substances as water, carbon dioxide and mineral salt.

[0258] The nucleic acid may be introduced directly into a plant cell or into the plant itself (including introduction into a tissue, organ or any other part of a plant). According to a preferred feature of the present invention, the nucleic acid is preferably introduced into a plant or plant cell by transformation. The term “transformation” is described in more detail in the “definitions” section herein.

[0259] In one embodiment the methods of the invention are methods for the production of a transgenic Poaceae plant, preferably a Saccharum species plant, a transgenic part thereof, or a transgenic plant cell thereof, having one or more enhanced yield-related traits relative to control plants, comprises the steps of
[0260] (i) introducing and expressing in said plant or said plant cell a recombinant PAE1 polypeptide-encoding nucleic acid or a genetic construct comprising a PAE1 polypeptide-encoding nucleic acid; and
[0261] (ii) in the case of a plant cell regenerate a plant from the plant cell; and
[0262] (iii) cultivating the plant under conditions promoting plant growth and development, preferably promoting plant growth and development of plants having one or more enhanced yield-related traits relative to control plants; and
[0263] (iv) optionally selecting plants with increased yield-related trait(s) due to increased expression of the PAE1 polypeptide and/or the PAE1 encoding nucleic acid; and
[0264] (v) harvesting setts and/or gems from the transgenic plant and planting the setts and/or gems and growing the setts and/or gems to plants, wherein the setts and/or gems comprises the exogenous nucleic acid encoding the PAE1 polypeptide and the promoter sequence operably linked thereto.

[0265] In one embodiment the present invention extends to any plant cell or plant produced by any of the methods described herein, and to all plant parts and propagules thereof.

[0266] The present invention encompasses plants or parts thereof (including seeds) obtainable by the methods according to the present invention. The plants or plant parts or plant cells comprise a nucleic acid transgene encoding a PAE1 polypeptide as defined above, preferably in a genetic construct such as an expression cassette. The present invention extends further to encompass the progeny of a primary transformed or transfected cell, tissue, organ or whole plant that has been produced by any of the aforementioned methods, the only requirement being that progeny exhibit the same genotypic and/or phenotypic characteristic(s) as those produced by the parent in the methods according to the invention.

[0267] In a further embodiment the invention extends to seeds recombinantly comprising the expression cassettes of the invention, the genetic constructs of the invention, or the nucleic acids encoding the PAE1 polypeptides and/or the PAE1 polypeptides as described above.

[0268] The invention also includes host cells containing an isolated nucleic acid encoding a PAE1 polypeptide as defined above. In one embodiment host cells according to the invention are plant cells, yeasts, bacteria or fungi. Host plants for the nucleic acids, construct, expression cassette or the vector used in the method according to the invention are, in principle, advantageously all plants which are capable of synthesizing the polypeptides used in the inventive method. In a particular embodiment the plant cells of the invention overexpress the nucleic acid molecule of the invention.

[0269] In a further embodiment the invention relates to a transgenic pollen grain comprising the construct of the invention and/or a haploid derivate of the plant cell of the invention. Although in one particular embodiment the pollen grain of the invention can not be used to regenerate an intact plant without adding further genetic material and/or is not capable of photosynthesis, said pollen grain of the invention may have uses in introducing the enhanced yield-related trait into another plant by fertilizing an egg cell of the other plant using a live pollen grain of the invention, producing a seed from the fertilized egg cell and growing a plant from the resulting seed. Further pollen grains find use as marker of geographical and/or temporal origin.

[0270] The methods of the invention are advantageously applicable to any plant, in particular to any plant as defined herein. Plants that are particularly useful in the methods of the invention include all plants which belong to the superfamily Viridiplantae, in particular monocotyledonous and dicotyledonous plants including fodder or forage legumes, ornamental plants, food crops, trees or shrubs. According to an embodiment of the present invention, the plant is a crop plant. Examples of crop plants include but are not limited to chicory, carrot, cassava, trefoil, soybean, beet, sugar beet, sunflower, canola, alfalfa, rapeseed, linseed, cotton, tomato, potato Stevia species such as but not limited to Stevia rebaudiana and tobacco. According to another embodiment of the present invention, the plant is a monocotyledonous plant. Examples of monocotyledonous plants include sugarcane. According to another embodiment of the present invention, the plant is a cereal. Examples of cereals include rice, maize, wheat, barley, millet, rye, triticale, sorghum, emmer, spelt, einkorn, teff, milo and oats. In a particular embodiment the plants of the invention, or used in the methods of the invention, are selected from the group consisting of maize, wheat, rice, soybean, cotton, oilseed rape including canola, sugarcane, sugar beet and alfalfa. Advantageously the methods of the invention are more efficient than the known methods, because the plants of the invention have increased yield and/or tolerance to an environmental stress compared to control plants used in comparable methods.

[0271] The invention also extends to harvestable parts of a plant such as, but not limited to seeds, leaves, fruits, flowers, stems, setts, sugarcane gems, roots, rhizomes, tubers and bulbs, which harvestable parts comprise a recombinant nucleic acid encoding a PAE1 polypeptide. In particular, such harvestable parts are roots such as taproots, rhizomes, fruits, stems, beets, tubers, bulbs, leaves, flowers and/or seeds. In one embodiment harvestable parts are stem cuttings (like setts of sugar cane).

[0272] The invention furthermore relates to products derived or produced, preferably directly derived or directly produced, from one or more harvestable part(s) of such a plant, such as dry pellets, pressed stems, setts, sugarcane gems, meal or powders, fibres, cloth, paper or cardboard containing fibres produced by the plants of the invention, oil, fat and fatty acids, carbohydrates, —including starches, paper or cardboard containing carbohydrates produced by the plants of the invention—, sap, juice molasses, syrup, chaff or proteins. Preferred carbohydrates are starch, cellulose or sugars, preferably sucrose. Also preferred products are residual dry fibers, e.g., of the stem (like bagasse from sugar cane after cane juice removal), molasses, or filtercake, preferably from sugar cane and/or sugar beet. Said products can be agricultural products.

[0273] In one embodiment the product comprises a recombinant nucleic acid encoding a PAE1 polypeptide and/or a recombinant PAE1 polypeptide for example as an indicator of the particular quality of the product. In another embodiment the invention relates to anti-counterfeit milled seed, milled stem and/or milled root having as an indication of origin and/or as an indication of producer a plant cell of the invention and/or the construct of the invention, wherein milled root preferably is milled beet, more preferably milled sugar beet.

[0274] The invention also includes methods for manufacturing a product comprising a) growing the plants of the invention and b) producing said product from or by the plants of the invention or parts thereof, including stem, sett, sugarcane gem, root, beet and/or seeds. In a further embodiment the methods comprise the steps of a) growing the plants of the invention, b) removing the harvestable parts as described herein from the plants and c) producing said product from, or with the harvestable parts of plants according to the invention. In one embodiment the method of the invention is a method for manufacturing cloth by a) growing the plants of the invention that are capable of producing fibres usable in cloth making, e.g. cotton, b) removing the harvestable parts as described herein from the plants, and c) producing fibres from said harvestable part and d) producing cloth from the fibres of c). Another embodiment of the invention relates to a method for producing feedstuff for bioreactors, fermentation processes or biogas plants, comprising a) growing the plants of the invention, b) removing the harvestable parts as described herein from the plants and c) producing feedstuff for bioreactors, fermentation processes or biogas plants. In a preferred embodiment the method of the invention is a method for producing alcohol(s) from plant material comprising a) growing the plants of the invention, b) removing the harvestable parts as described herein from the plants and c) optionally producing feedstuff for fermentation process, and d)—following step b) or c)—producing one or more alcohol(s) from said feedstuff or harvestable parts, preferably by using microorganisms such as fungi, algae, bacteria or yeasts, or cell cultures. A typical example would be the production of ethanol using carbohydrate containing harvestable parts, for example corn seed, sugarcane stem parts or beet parts of sugar beet. In one embodiment, the product is produced from the stem of the transgenic plant. In another embodiment the product is produced from the root, preferable taproot and/or beet of the plant.

[0275] In another embodiment the method of the invention is a method for the production of one or more polymers comprising a) growing the plants of the invention, b) removing the harvestable parts as described herein from the plants and c) producing one or more monomers from the harvestable parts, optionally involving intermediate products, d) producing one or more polymer(s) by reacting at least one of said monomers with other monomers or reacting said monomer(s) with each other. In another embodiment the method of the invention is a method for the production of a pharmaceutical compound comprising a) growing the plants of the invention, b) removing the harvestable parts as described herein from the plants and c) producing one or more monomers from the harvestable parts, optionally involving intermediate products, d) producing a pharmaceutical compound from the harvestable parts and/or intermediate products. In another embodiment the method of the invention is a method for the production of one or more chemicals comprising a) growing the plants of the invention, b) removing the harvestable parts as described herein from the plants and c) producing one or more chemical building blocks such as but not limited to Acetate, Pyruvate, lactate, fatty acids, sugars, amino acids, nucleotides, carotenoids, terpenoids or steroids from the harvestable parts, optionally involving intermediate products, d) producing one or more chemical(s) by reacting at least one of said building blocks with other building block or reacting said building block(s) with each other.

[0276] The present invention is also directed to a product obtained by a method for manufacturing a product, as described herein. In a further embodiment the products produced by the manufacturing methods of the invention are plant products such as, but not limited to, a foodstuff, feedstuff, a food supplement, feed supplement, fibre, cosmetic or pharmaceutical. In another embodiment the methods for production are used to make agricultural products such as, but not limited to, fibres, plant extracts, meal or presscake and other leftover material after one or more extraction processes, flour, proteins, amino acids, carbohydrates, fats, oils, polymers, vitamins, and the like. Preferred carbohydrates are sugars, preferably sucrose. In one embodiment the agricultural product is selected from the group consisting of 1) fibres, 2) timber, 3) plant extracts, 4) meal or presscake or other leftover material after one or more extraction processes, 5) flour, 6) proteins, 7) carbohydrates, 8) fats, 9) oils, 10) polymers e.g. cellulose, starch, lignin, lignocellulose, and 11) combinations and/or mixtures of any of 1) to 10). In a preferable embodiment the product or agricultural product does generally not comprise living plant cells, does comprise the expression cassette, genetic construct, protein and/or polynucleotide as described herein.

[0277] In yet another embodiment the polynucleotides or the polypeptides or the constructs of the invention are comprised in an agricultural product. In a particular embodiment the nucleic acid sequences and protein sequences of the invention may be used as product markers, for example where an agricultural product was produced by the methods of the invention. Such a marker can be used to identify a product to have been produced by an advantageous process resulting not only in a greater efficiency of the process but also improved quality of the product due to increased quality of the plant material and harvestable parts used in the process. Such markers can be detected by a variety of methods known in the art, for example but not limited to PCR based methods for nucleic acid detection or antibody based methods for protein detection.

[0278] A further embodiment of the invention is a commercial package comprising
[0279] I. propagules of the plants of the invention, such as but not limited to setts or gems of sugarcane, and/or
[0280] II. comprising the plant cells of the invention, and/or
[0281] III. comprising the polynucleotides and/or the polypeptides and/or the constructs of the invention comprised in an agricultural product, and/or
[0282] IV. comprising the recombinant chromosomal DNA of the invention.

[0283] A further embodiment of the invention is a protective covering comprising
[0284] 1. propagules of the plants of the invention, such as but not limited to setts or gems of sugarcane, and/or
[0285] 2. comprising the plant cells of the invention, and/or
[0286] 3. comprising the polynucleotides and/or the polypeptides and/or the constructs of the invention comprised in an agricultural product, and/or
[0287] 4. comprising the recombinant chromosomal DNA of the invention.

[0288] The protective covering is any kind of repository which allows safe-keeping of the material according to points 1 to 4 above. On the one hand the protective covering can be re-usable and/or re-sealable. On the other hand the protective covering can be of one-way nature and/or biodegradable. Preferably, the protective covering is a commercial package. More preferably, the protective covering is testa.

[0289] The present invention also encompasses use of nucleic acids encoding PAE1 polypeptides as described herein and use of these PAE1 polypeptides in enhancing any of the aforementioned yield-related traits in plants. For example, nucleic acids encoding PAE1 polypeptide described herein, or the PAE1 polypeptides themselves, may find use in breeding programmes in which a DNA marker is identified which may be genetically linked to a PAE1 polypeptide-encoding gene. The nucleic acids/genes, or the PAE1 polypeptides themselves may be used to define a molecular marker. This DNA or protein marker may then be used in breeding programmes to select plants having one or more enhanced yield-related traits as defined herein in the methods of the invention. Furthermore, allelic variants of a PAE1 polypeptide-encoding nucleic acid/gene may find use in marker-assisted breeding programmes. Nucleic acids encoding PAE1 polypeptides may also be used as probes for genetically and physically mapping the genes that they are a part of, and as markers for traits linked to those genes. Such information may be useful in plant breeding in order to develop lines with desired phenotypes.

[0290] In one embodiment, the total storage carbohydrate content of the plants of the invention, or parts thereof and in particular of the harvestable parts of the plant(s) is increased compared to control plant(s) and the corresponding plant parts of the control plants.

[0291] Storage carbohydrates are preferably sugars such as but not limited to sucrose, fructose and glucose, and polysaccharides such as but not limited to starches, glucans and fructans. The total storage carbohydrate content and the content of individual groups or species of carbohydrates may be measured in a number of ways known in the art. For example, the international application published as WO2006066969 discloses in paragraphs [79] to [117] a method to determine the total storage carbohydrate content of sugarcane, including fructan content.

[0292] For sugarcane the following method can be used for sugar content analysis:

[0293] The transgenic sugarcane plants are grown for 10 to 15 months, either in the greenhouse or the field. Standard conditions for growth of the plants are used. Stalks of sugarcane plants which are 10 to 15 months old and have more than 10 internodes are harvested. After all of the leaves have been removed, the internodes of the stalk are numbered from top (=1) to bottom (for example=36). A stalk disc approximately 1-2 g in weight is excised from the middle of each internode. The stalk discs of 3 internodes are then combined to give one sample and frozen in liquid nitrogen. The fresh weight of the samples is determined. The extraction for the purposes of the sugar determination is done as described below.

[0294] For the sugar extraction, the stalk discs are first comminuted in a Waring blender (from Waring, New Hartford, Conn., USA). The sugars are extracted by shaking for one hour at 95° C. in 10 mM sodium phosphate buffer pH 7.0. Thereafter, the solids are removed by filtration through a 30 μm sieve. The resulting solution is subsequently employed for the sugar determination (see herein below).

[0295] The glucose, fructose and sucrose contents in the extract obtained in accordance with the sugar extraction method described above is determined photometrically in an enzyme assay via the conversion of NAD+ (nicotinamide adenine dinucleotide) into NADH (reduced nicotinamide adenine dinucleotide). During the reduction, the aromatic character at the nicotinamide ring is lost, and the absorption spectrum thus changes. This change in the absorption spectrum can be detected photometrically. The glucose and fructose present in the extract is converted into glucose-6-phosphate and fructose-6-phosphate by means of the enzyme hexokinase and adenosin triphosphate (ATP). The glucose-6-phosphate is subsequently oxidized by the enzyme glucose-6-phosphate dehydrogenase to give 6-phosphogluconate. In this reaction, NAD+ is reduced to give NADH, and the amount of NADH formed is determined photometrically. The ratio between the NADH formed and the glucose present in the extract is 1:1, so that the glucose content can be calculated from the NADH content using the molar absorption coefficient of NADH (at 340 nm 6.2 per mmol and per cm lightpath). Following the complete oxidation of glucose-6-phosphate, fructose-6-phosphate, which has likewise formed in the solution, is converted by the enzyme phosphoglucoisomerase to give glucose-6-phosphate which, in turn, is oxidized to give 6-phosphogluconate. Again, the ratio between fructose and the amount of NADH formed is 1:1. Thereafter, the sucrose present in the extract is cleaved by the enzyme sucrase (Megazyme) to give glucose and fructose. The glucose and fructose molecules liberated are then converted with the abovementioned enzymes in the NAD+-dependent reaction to give 6-phosphogluconate. The conversion of one sucrose molecule into 6-phosphogluconate results in two NADH molecules. The amount of NADH formed is likewise determined photometrically and used for calculating the sucrose content, using the molar absorption coefficient of NADH.

[0296] Furthermore transgenic sugarcane plants may be analysed using any method known in the art for example but not limited to:
[0297] The Sampling of Sugar Cane by the Full Width Hatch Sampler; ICUMSA (International Commission for Uniform Methods of Sugar Analysis, http://www.icumsa.org/index.php?id=4) Method GS 5-5 (1994) available from Verlag Dr. Albert Bartens K G, Lückhoffstr. 16, 14129 Berlin (http://www.bartens.com/)
[0298] The Sampling of Sugar Cane by the Corer Method; ICUMSA Method GS 5-7 (1994) available from Verlag Dr. Albert Bartens KG, Lückhoffstr. 16, 14129 Berlin (http://www.bartens.com/)
[0299] The Determination of Sucrose by Gas Chromatography in Molasses and Factory Products—Official; and Cane Juice; ICUMSA Method GS 4/7/8/5-2 (2002) available from Verlag Dr. Albert Bartens K G, Lückhoffstr. 16, 14129 Berlin (http://www.bartens.com/)
[0300] The Determination of Sucrose, Glucose and Fructose by HPLC—in Cane Molasses—and Sucrose in Beet Molasses; ICUMSA Method GS 7/4/8-23 (2011) available from Verlag Dr. Albert Bartens K G, Lückhoffstr. 16, 14129 Berlin (http://www.bartens.com/)
[0301] The Determination of Glucose, Fructose and Sucrose in Cane Juices, Syrups and Molasses, and of Sucrose in Beet Molasses by High Performance Ion Chromatography; ICUMSA Method GS 7/8/4-24 (2011) available from Verlag Dr. Albert Bartens K G, Lückhoffstr. 16, 14129 Berlin (http://www.bartens.com/).

[0302] For crops other than sugarcane, similar methods are known in the art or can easily be adapted from a known method for another crop. For example, the storage carbohydrate content of sugar beet may be determined by any of methods described for sugarcane above with adaptations to sugar beet.

[0303] Further transgenic sugar beet plants may be analysed for biomass or their sugar content or other phenotypic parameters using any method known in the art for example but not limited to:
[0304] The Determination of Glucose and Fructose in Beet Juices and Processing Products by an Enzymatic Method—ICUMSA (International Commission for Uniform Methods of Sugar Analysis, http://www.icumsa.org/index.php?id=4) Method GS 8/4/6-4 (2007) available from Verlag Dr. Albert Bartens K G, Lückhoffstr. 16, 14129 Berlin (http://www.bartens.com/)
[0305] The Determination of Mannitol, Glucose, Fructose, Sucrose and Raffinose in Beet Brei and Beet Juices by HPAEC-PAD; ICUMSA Method GS8-26 (2011) available from Verlag Dr. Albert Bartens K G, Lückhoffstr. 16, 14129 Berlin (http://www.bartens.com/)
[0306] The Determination of Sucrose, Glucose and Fructose by HPLC—in Cane Molasses—and Sucrose in Beet Molasses; ICUMSA Method GS 7/4/8-23 (2011) available from Verlag Dr. Albert Bartens K G, Lückhoffstr. 16, 14129 Berlin (http://www.bartens.com/)
[0307] The Determination of Glucose, Fructose and Sucrose in Cane Juices, Syrups and Molasses, and of Sucrose in Beet Molasses by High Performance Ion Chromatography; ICUMSA Method GS 7/8/4-24 (2011) available from Verlag Dr. Albert Bartens K G, Lückhoffstr. 16, 14129 Berlin (http://www.bartens.com/)
[0308] The Determination of Glucose and Fructose in Beet Juices and Processing Products by an Enzymatic Method; ICUMSA Method GS 8/4/6-4 (2007) available from Verlag Dr. Albert Bartens K G, Lückhoffstr. 16, 14129 Berlin (http://www.bartens.com/)
[0309] The Determination of the Apparent Total Sugar Content of Beet Pulp by the Luff Schoorl Procedure; ICUMSA Method GS 8-5 (1994) available from Verlag Dr. Albert Bartens K G, Lückhoffstr. 16, 14129 Berlin (http://www.bartens.com/).

[0310] Further it is to be understood that “comprising” throughout this application may in one embodiment be replaced by “substantially consisting of”, preferably when “comprising” refers to the polynucleotides, constructs, recombinant chromosomal DNA and/or polypeptides of the invention. For example “comprising the POI encoding nucleic acid” may be replaced by “substantially consisting of the POI encoding nucleic acid”.

[0311] Moreover, the present invention relates to the following specific embodiments “items”, wherein the expression “as defined in item X” is meant to direct the artisan to apply the definition as disclosed in item X. For example, “a nucleic acid as defined in item 1” has to be understood such that the definition of the nucleic acid as in item 1 is to be applied to the nucleic acid. In consequence the term “as defined in item” may be replaced with the corresponding definition of that item:

### Items:

[0312] 1. A method for enhancing one or more yield-related traits in plants relative to control plants, comprising modulating expression in a plant of a nucleic acid encoding a PAE1 polypeptide, wherein said PAE1 polypeptide comprises one or more motifs having in increasing order of preference at least 50%, 55%, 60%, 65%, 70%, 75%, 80%, 85%, 90%, 95%, 96%, 97%, 98%, 99% or more sequence identity to any one or more of the motifs 1 to 7D as provided in SEQ ID NO: 455 to SEQ ID NO: 464.
[0313] 2. Method according to item 1, wherein said modulated expression is effected by introducing and expressing in a plant said nucleic acid encoding said PAE1 polypeptide.
[0314] 3. Method according to item 1 or 2, wherein said one or more enhanced yield-related traits comprise increased yield relative to control plants, and preferably comprise increased biomass and/or increased seed yield relative to control plants.
[0315] 4. Method according to any one of items 1 to 3, wherein said one or more enhanced yield-related traits are obtained under non-stress conditions.
[0316] 5. Method according to any one of items 1 to 3, wherein said one or more enhanced yield-related traits are obtained under conditions of drought stress, salt stress or nitrogen deficiency.
[0317] 6. Method according to any of items 1 to 5, wherein said PAE1 polypeptide comprises
   [0318] a. all of the following motifs:
      [0319] (i) Motif 1 represented by SEQ ID NO: 455,
      [0320] (ii) Motif 2 represented by SEQ ID NO: 456,
      [0321] (iii) Motif 3 represented by SEQ ID NO: 457,
      [0322] (iv) Motif 4 represented by SEQ ID NO: 458,
      [0323] (v) Motif 5 represented by SEQ ID NO: 459,
      [0324] (vi) Motif 6 represented by SEQ ID NO: 460,
      [0325] (vii) Motif 7, wherein motif 7 is selected from the group consisting of SEQ ID NO: 461 (Motif 7A), SEQ ID NO: 462 (Motif 7B), SEQ ID NO: 463 (Motif 7C), and SEQ ID NO: 464 (Motif 7D),
   [0326] b. any 7, 6, 5, 4, 3 or 2 of the motifs 1 to 7 as defined under a.); or
   [0327] c. Motif 1 or Motif 2 or Motif 3 or Motif 4 or Motif 5 or Motif 6 or Motif 7A or Motif 7B or Motif 7C or Motif 7D as defined under a.
[0328] 7. Method according to any one of items 1 to 6, wherein said nucleic acid encoding a PAE1 is of plant origin, preferably from a dicotyledonous plant, further preferably from the family Poaceae, more preferably from the genus Oryza, most preferably from Oryza sativa.
[0329] 8. Method according to any one of items 1 to 7, wherein said nucleic acid encoding a PAE1 encodes any one of the polypeptides listed in Table A or is a portion of such a nucleic acid, or a nucleic acid capable of hybridising with such a nucleic acid.
[0330] 9. Method according to any one of items 1 to 8, wherein said nucleic acid sequence encodes an orthologue or paralogue of any of the polypeptides given in Table A.
[0331] 10. Method according to any one of items 1 to 9, wherein said nucleic acid encodes the polypeptide represented by SEQ ID NO: 2, or a homologue thereof, or SEQ ID NO: 467, or a homologue thereof.
[0332] 11. Method according to any one of items 1 to 10, wherein said nucleic acid is operably linked to a constitutive promoter of plant origin, preferably to a medium strength constitutive promoter of plant origin, more preferably to a GOS2 promoter, most preferably to a GOS2 promoter from rice.
[0333] 12. Plant, or part thereof, or plant cell, obtainable by a method according to any one of items 1 to 11, wherein said plant, plant part or plant cell comprises a recombinant nucleic acid encoding a PAE1 polypeptide as defined in any of items 1 and 6 to 10.
[0334] 13. Construct comprising:
   [0335] (i) nucleic acid encoding an PAE1 as defined in any of items 1 and 6 to 10;
   [0336] (ii) one or more control sequences capable of driving expression of the nucleic acid sequence of (i); and optionally
   [0337] (iii) a transcription termination sequence.
[0338] 14. Construct according to item 13, wherein one of said control sequences is a constitutive promoter of plant origin, preferably to a medium strength constitutive promoter of plant origin, more preferably to a GOS2 promoter, most preferably to a GOS2 promoter from rice.
[0339] 15. A host cell, preferably a bacterial host cell, more preferably an Agrobacterium species host cell comprising the construct according to any of items 13 or 14.
[0340] 16. Use of a construct according to item 13 or 14 in a method for making plants having one or more enhanced yield-related traits, preferably increased yield relative to control plants, and more preferably increased seed yield and/or increased biomass relative to control plants.
[0341] 17. Plant, plant part or plant cell transformed with a construct according to item 13 or 14.
[0342] 18. Method for the production of a transgenic plant having one or more enhanced yield-related traits relative to control plants, preferably increased yield relative to control plants, and more preferably increased seed yield and/or increased biomass relative to control plants, comprising:
   [0343] (i) introducing and expressing in a plant cell or plant a nucleic acid encoding an PAE1 polypeptide as defined in any one of items 1 and 6 to 10; and
   [0344] (ii) cultivating said plant cell or plant under conditions promoting plant growth and development.
[0345] 19. Transgenic plant having one or more enhanced yield-related traits relative to control plants, preferably increased yield relative to control plants, and more preferably increased seed yield and/or increased biomass, resulting from modulated expression of a nucleic acid encoding a PAE1 polypeptide as defined in any of items 1 and 6 to 10 or a transgenic plant cell derived from said transgenic plant.
[0346] 20. Transgenic plant according to item 12, 17 or 19, or a transgenic plant cell derived therefrom, wherein said plant is a crop plant, such as beet, sugarbeet or alfalfa; or a monocotyledonous plant such as sugarcane; or a cereal, such as rice, maize, wheat, barley, millet, rye, triticale, sorghum, emmer, spelt, einkorn, teff, milo or oats.
[0347] 21. Harvestable part of a plant according to item 20, wherein said harvestable parts are preferably shoot biomass and/or root biomass and/or seeds.
[0348] 22. A product derived from a plant according to item 20 and/or from harvestable parts of a plant according to item 21.
[0349] 23. Use of a nucleic acid encoding an PAE1 polypeptide as defined in any of items 1 and 6 to 10 for enhancing one or more yield-related traits in plants relative to control plants, preferably for increasing yield, and more preferably for increasing seed yield and/or for increasing biomass in plants relative to control plants.
[0350] 24. A method for manufacturing a product comprising the steps of growing the plants or plant parts according to item 12, 17, 20 or 21 and producing said product from or by said plants or parts thereof, including seeds.
[0351] 25. Recombinant chromosomal DNA comprising the construct according to item 13 or 14.
[0352] 26. Plant expression construct according to item 13 or 14 or recombinant chromosomal DNA according to item 25 comprised in a host cell, preferably in a plant cell, more preferably in a crop plant cell.
[0353] 27. An isolated nucleic acid molecule selected from the group consisting of:
   [0354] (i) a nucleic acid represented by SEQ ID NO: 1;
   [0355] (ii) the complement of a nucleic acid represented by SEQ ID NO: 1;
   [0356] (iii) a nucleic acid encoding a PAE1 polypeptide having in increasing order of preference at least 25%, 26%, 27%, 28%, 29%, 30%, 31%, 32%, 33%, 34%, 35%, 36%, 37%, 38%, 39%, 40%, 41%, 42%, 43%, 44%, 45%, 46%, 47%, 48%, 49%, 50%, 51%, 52%, 53%, 54%, 55%, 56%, 57%, 58%, 59%, 60%, 61%, 62%, 63%, 64%, 65%, 66%, 67%, 68%, 69%, 70%, 71%, 72%, 73%, 74%, 75%, 76%, 77%, 78%, 79%, 80%, 81%, 82%, 83%, 84%, 85%, 86%, 87%, 88%, 89%, 90%, 91%, 92%, 93%, 94%, 95%, 96%, 97%, 98%, or 99% sequence identity to the amino acid sequence represented by SEQ ID NO: 2 and additionally or alternatively comprising one or more motifs having in increasing order of preference at least 50%, 55%, 60%, 65%, 70%, 75%, 80%, 85%, 90%, 95%, 96%, 97%, 98%, 99% or more sequence identity to any one or more of the motifs 1 to 7D as provided in SEQ ID NO: 455 to SEQ ID NO: 464, and further preferably conferring one or more enhanced yield-related traits relative to control plants; and
   [0357] (iv) a nucleic acid molecule which hybridizes with a nucleic acid molecule of (i) to (iii) under high stringency hybridization conditions and preferably confers one or more enhanced yield-related traits relative to control plants.
[0358] 28. An isolated polypeptide encoded by the isolated nucleotide according to item 27.
[0359] 29. An expression cassette comprising the isolated nucleic acid molecule according to item 27 and a promoter which is operably linked to said isolated nucleic acid molecule, and, optionally, a transcription termination sequence.
[0360] 30. An expression cassette according to item 29, wherein said promoter is heterologous with respect to said nucleic acid molecule.
[0361] 31. An expression vector comprising the expression cassette of item 29 or 30, in particular a T-DNA vector.
[0362] 32. A host cell comprising the isolated nucleic acid molecule of item 27, the expression cassette of items 29 or 30, or the vector of item 31.
[0363] 33. A host cell according to item 32, wherein said host cell is an Agrobacterium cell or a plant cell.
[0364] 34. A plant comprising the isolated nucleic acid molecule of item 27, the expression cassette of items 29 or 30, or the vector of item 31.
[0365] 35. Method according to any one of items 1 to 11, wherein said polypeptide is encoded by a nucleic acid molecule comprising a nucleic acid molecule selected from the group consisting of:
   [0366] (i) a nucleic acid represented by SEQ ID NO: 1;
   [0367] (ii) the complement of a nucleic acid represented by SEQ ID NO: 1;
   [0368] (iii) a nucleic acid encoding the polypeptide as represented by SEQ ID NO: 2, and further preferably confers one or more enhanced yield-related traits relative to control plants;
   [0369] (iv) a nucleic acid having, in increasing order of preference at least 25%, 26%, 27%, 28%, 29%, 30%, 31%, 32%, 33%, 34%, 35%, 36%, 37%, 38%, 39%, 40%, 41%, 42%, 43%, 44%, 45%, 46%, 47%, 48%, 49%, 50%, 51%, 52%, 53%, 54%, 55%, 56%, 57%, 58%, 59%, 60%, 61%, 62%, 63%, 64%, 65%, 66%, 67%, 68%, 69%, 70%, 71%, 72%, 73%, 74%, 75%, 76%, 77%, 78%, 79%, 80%, 81%, 82%, 83%, 84%, 85%, 86%, 87%, 88%, 89%, 90%, 91%, 92%, 93%, 94%, 95%, 96%, 97%, 98%, or 99% sequence identity with SEQ ID NO: 1, and further preferably conferring one or more enhanced yield-related traits relative to control plants,
   [0370] (v) a nucleic acid molecule which hybridizes to the complement of a nucleic acid molecule of (i) to (iv) under stringent hybridization conditions and preferably confers one or more enhanced yield-related traits relative to control plants,
   [0371] (vi) a nucleic acid encoding said polypeptide having, in increasing order of preference, at least 25%, 26%, 27%, 28%, 29%, 30%, 31%, 32%, 33%, 34%, 35%, 36%, 37%, 38%, 39%, 40%, 41%, 42%, 43%, 44%, 45%, 46%, 47%, 48%, 49%, 50%, 51%, 52%, 53%, 54%, 55%, 56%, 57%, 58%, 59%, 60%, 61%, 62%, 63%, 64%, 65%, 66%, 67%, 68%, 69%, 70%, 71%, 72%, 73%, 74%, 75%, 76%, 77%, 78%, 79%, 80%, 81%, 82%, 83%, 84%, 85%, 86%, 87%, 88%, 89%, 90%, 91%, 92%, 93%, 94%, 95%, 96%, 97%, 98%, or 99% sequence identity to the amino acid sequence represented by SEQ ID NO: 2 and preferably conferring one or more enhanced yield-related traits relative to control plants; or
   [0372] (vii) a nucleic acid comprising any combination(s) of features of (i) to (vi) above.

### DESCRIPTION OF FIGURES

[0373] The present invention will now be described with reference to the following figures in which:

[0374] FIG. 1 represents the domain structure of SEQ ID NO: 2 with conserved motifs indicated and shown in bold. The “G×S×G” motif (positions 188-192 of SEQ ID NO: 2) and an Asp residue (at position 286 of SEQ ID NO: 2) are shown with underline.

[0375] FIG. 2 represents the binary vector used for increased expression in Oryza sativa of a PAE1-encoding nucleic acid under the control of a rice GOS2 promoter (pGOS2).

### EXAMPLES

[0376] The present invention will now be described with reference to the following examples, which are by way of illustration only. The following examples are not intended to limit the scope of the invention. In particular, the plants used in the described experiments are used because Arabidopsis, tobacco, rice and corn plants are model plants for the testing of transgenes. They are widely used in the art for the relative ease of testing while having a good transferability of the results to other plants used in agriculture, such as but not limited to maize, wheat, rice, soybean, cotton, oilseed rape including canola, sugarcane, sugar beet and alfalfa, or other dicot or monocot crops. Unless otherwise indicated, the present invention employs conventional techniques and methods of plant biology, molecular biology, bioinformatics and plant breedings.

[0377] DNA manipulation: unless otherwise stated, recombinant DNA techniques are performed according to standard protocols described in (Sambrook (2001) Molecular Cloning: a laboratory manual, 3rd Edition Cold Spring Harbor Laboratory Press, CSH, New York) or in Volumes 1 and 2 of Ausubel et al. (1994), Current Protocols in Molecular Biology, Current Protocols. Standard materials and methods for plant molecular work are described in Plant Molecular Biology Labfax (1993) by R. D. D. Croy, published by BIOS Scientific Publications Ltd (UK) and Blackwell Scientific Publications (UK).

### Example 1

### Identification of Sequences Related to SEQ ID NO: 1 and SEQ ID NO: 2

[0378] Sequences (full length cDNA, ESTs or genomic) related to SEQ ID NO: 1 and SEQ ID NO: 2 were identified amongst those maintained in the Entrez Nucleotides database at the National Center for Biotechnology Information (NCBI) using database sequence search tools, such as the Basic Local Alignment Tool (BLAST) (Altschul et al. (1990) J. Mol. Biol. 215:403-410; and Altschul et al. (1997) Nucleic Acids Res. 25:3389-3402). The program is used to find regions of local similarity between sequences by comparing nucleic acid or polypeptide sequences to sequence databases and by calculating the statistical significance of matches. For example, the polypeptide encoded by the nucleic acid of SEQ ID NO: 1 was used for the TBLASTN algorithm, with default settings and the filter to ignore low complexity sequences set off. The output of the analysis was viewed by pairwise comparison, and ranked according to the probability score (E-value), where the score reflect the probability that a particular alignment occurs by chance (the lower the E-value, the more significant the hit). In addition to E-values, comparisons were also scored by percentage identity. Percentage identity refers to the number of identical nucleotides (or amino acids) between the two compared nucleic acid (or polypeptide) sequences over a particular length. In some instances, the default parameters may be adjusted to modify the stringency of the search. For example the E-value may be increased to show less stringent matches. This way, short nearly exact matches may be identified.

[0379] Table A provides Os_PAE gene and protein of the present invention (SEQ ID NOs: 1 and 2), and a list of nucleic acid sequences related to SEQ ID NO: 1 and SEQ ID NO: 2. Also shown is the global sequence identity to SEQ ID NO: 2 for each protein sequence in the table, as determined by MatGAT (Matrix Global Alignment Tool) software analysis (see Example 3 below).

TABLE A
Examples of PAE1 nucleic acids and polypeptides:

| | | Nucleotide | Protein | % Identity |
|---|---|---|---|---|
| | | SEQ ID | SEQ ID | to SEQ |
| Gene name | Plant source | NO: | NO: | ID NO: 2 |
| Os_PAE | Oryza sativa | 1 | 2 | |
| H_001_Br | Brassica rapa | 3 | 4 | 47.1 |
| H_002_Br | Brassica rapa | 5 | 6 | 46.5 |
| H_003_Br | Brassica rapa | 7 | 8 | 45.1 |
| H_004_Br | Brassica rapa | 9 | 10 | 48.2 |
| H_005_Br | Brassica rapa | 11 | 12 | 41.3 |
| H_006_Br | Brassica rapa | 13 | 14 | 42.3 |
| H_007_Br | Brassica rapa | 15 | 16 | 48 |
| H_008_Br | Brassica rapa | 17 | 18 | 43.9 |
| H_009_Br | Brassica rapa | 19 | 20 | 47 |
| H_010_Gm | Glycine max | 21 | 22 | 43.3 |
| H_011_Gm | Glycine max | 23 | 24 | 42.4 |
| H_012_Gm | Glycine max | 25 | 26 | 54.3 |
| H_013_Gm | Glycine max | 27 | 28 | 54.7 |
| H_014_Gm | Glycine max | 29 | 30 | 47.1 |
| H_015_Gm | Glycine max | 31 | 32 | 47.9 |
| H_016_Gm | Glycine max | 33 | 34 | 48.8 |
| H_017_Zm | Zea mays | 35 | 36 | 42.8 |
| H_018_Zm | Zea mays | 37 | 38 | 40.9 |
| H_019_Mt | Medicago truncatula | 39 | 40 | 45.6 |
| H_020_Mt | Medicago truncatula | 41 | 42 | 46 |
| H_021_Os | Oryza sativa | 43 | 44 | 44.5 |
| H_022_Lu | Linum usitatissimum | 45 | 46 | 44.6 |
| H_023_Lu | Linum usitatissimum | 47 | 48 | 45.5 |
| H_024_Lu | Linum usitatissimum | 49 | 50 | 47.7 |
| H_025_Pt | Populus trichocarpa | 51 | 52 | 41.4 |
| H_026_Pt | Populus trichocarpa | 53 | 54 | 48.8 |
| H_027_Pt | Populus trichocarpa | 55 | 56 | 50.2 |
| H_028_Pt | Populus trichocarpa | 57 | 58 | 44.1 |
| H_029_Pt | Populus trichocarpa | 59 | 60 | 44.9 |
| H_030_Pt | Populus trichocarpa | 61 | 62 | 50.5 |
| H_031_Sb | Sorghum bicolor | 63 | 64 | 41.9 |
| H_032_Sl | Solanum lycopersicum | 65 | 66 | 48 |
| H_033_Sl | Solanum lycopersicum | 67 | 68 | 46.9 |
| H_034_Zm | Zea mays | 69 | 70 | 69.3 |
| H_035_Hv | Hordeum vulgare | 71 | 72 | 68 |
| H_036_Os | Oryza sativa | 73 | 74 | 41 |
| | Japonica Group | | | |
| H_037_Os | Oryza sativa | 75 | 76 | 37.9 |
| | Japonica Group | | | |
| H_038_Os | Oryza sativa | 77 | 78 | 38.3 |
| | Japonica Group | | | |
| H_039_Os | Oryza sativa | 79 | 80 | 42.3 |
| | Japonica Group | | | |
| H_040_Os | Oryza sativa | 81 | 82 | 36.2 |
| | Japonica Group | | | |
| H_041_Os | Oryza sativa | 83 | 84 | 80.3 |
| | Japonica Group | | | |
| H_042_Zm | Zea mays | 85 | 86 | 69.1 |
| H_043_Zm | Zea mays | 87 | 88 | 41.2 |
| H_044_Zm | Zea mays | 89 | 90 | 36.1 |
| H_045_Zm | Zea mays | 91 | 92 | 40.6 |
| H_046_At | Arabidopsis thaliana | 93 | 94 | 35.9 |
| H_047_At | Arabidopsis thaliana | 95 | 96 | 51.8 |
| H_048_At | Arabidopsis thaliana | 97 | 98 | 29.2 |
| H_049_At | Arabidopsis thaliana | 99 | 100 | 43.3 |
| H_050_At | Arabidopsis thaliana | 101 | 102 | 45.7 |
| H_051_At | Arabidopsis thaliana | 103 | 104 | 46.5 |
| H_052_At | Arabidopsis thaliana | 105 | 106 | 35.4 |
| H_053_At | Arabidopsis thaliana | 107 | 108 | 46.8 |
| H_054_At | Arabidopsis thaliana | 109 | 110 | 39.4 |
| H_055_At | Arabidopsis thaliana | 111 | 112 | 39 |
| H_056_At | Arabidopsis thaliana | 113 | 114 | 37.1 |
| H_057_At | Arabidopsis thaliana | 115 | 116 | 47.7 |
| H_058_At | Arabidopsis thaliana | 117 | 118 | 37.7 |
| H_059_At | Arabidopsis thaliana | 119 | 120 | 47.1 |
| H_060_At | Arabidopsis thaliana | 121 | 122 | 39.1 |
| H_061_At | Arabidopsis thaliana | 123 | 124 | 38.4 |
| H_062_At | Arabidopsis thaliana | 125 | 126 | 36.9 |
| H_063_At | Arabidopsis thaliana | 127 | 128 | 37.1 |
| H_064_At | Arabidopsis thaliana | 129 | 130 | 35.9 |
| H_065_Pp | Physcomitrella patens | 131 | 132 | 29.8 |
| | subsp. patens | | | |
| H_066_Vv | Vitis vinifera | 133 | 134 | 40.2 |
| H_067_Vv | Vitis vinifera | 135 | 136 | 38 |
| H_068_Vv | Vitis vinifera | 137 | 138 | 29.6 |
| H_069_Vv | Vitis vinifera | 139 | 140 | 47 |
| H_070_Vv | Vitis vinifera | 141 | 142 | 50 |
| H_071_Vv | Vitis vinifera | 143 | 144 | 45.8 |
| H_072_Vv | Vitis vinifera | 145 | 146 | 47.1 |
| H_073_Pt | Populus trichocarpa | 147 | 148 | 38.3 |
| H_074_Pt | Populus trichocarpa | 149 | 150 | 35.3 |
| H_075_Pt | Populus trichocarpa | 151 | 152 | 37.8 |
| H_076_Pt | Populus trichocarpa | 153 | 154 | 45.4 |
| H_077_Pt | Populus trichocarpa | 155 | 156 | 37 |
| H_078_Pt | Populus trichocarpa | 157 | 158 | 40.3 |
| H_079_Pt | Populus trichocarpa | 159 | 160 | 49.3 |
| H_080_Sb | Sorghum bicolor | 161 | 162 | 39.1 |
| H_081_Sb | Sorghum bicolor | 163 | 164 | 40.2 |
| H_082_Sb | Sorghum bicolor | 165 | 166 | 41.1 |
| H_083_Sb | Sorghum bicolor | 167 | 168 | 35.2 |
| H_084_Sb | Sorghum bicolor | 169 | 170 | 41.5 |
| H_085_Sb | Sorghum bicolor | 171 | 172 | 44.8 |
| H_086_Sb | Sorghum bicolor | 173 | 174 | 37.6 |
| H_087_Sb | Sorghum bicolor | 175 | 176 | 70.5 |
| H_088_Rc | Ricinus communis | 177 | 178 | 50 |
| H_089_Rc | Ricinus communis | 179 | 180 | 34.4 |
| H_090_Rc | Ricinus communis | 181 | 182 | 49.2 |
| H_091_Rc | Ricinus communis | 183 | 184 | 41 |
| H_092_Rc | Ricinus communis | 185 | 186 | 35 |
| H_093_Rc | Ricinus communis | 187 | 188 | 37.5 |
| H_094_Al | Arabidopsis lyrata | 189 | 190 | 37.9 |
| | subsp. lyrata | | | |
| H_095_Al | Arabidopsis lyrata | 191 | 192 | 38.6 |
| | subsp. lyrata | | | |
| H_096_Al | Arabidopsis lyrata | 193 | 194 | 37.5 |
| | subsp. lyrata | | | |
| H_097_Al | Arabidopsis lyrata | 195 | 196 | 47.4 |
| | subsp. lyrata | | | |
| H_098_Al | Arabidopsis lyrata | 197 | 198 | 46.5 |
| | subsp. lyrata | | | |
| H_099_Al | Arabidopsis lyrata | 199 | 200 | 51.1 |
| | subsp. lyrata | | | |
| H_100_Al | Arabidopsis lyrata | 201 | 202 | 45.9 |
| | subsp. lyrata | | | |
| H_101_Al | Arabidopsis lyrata | 203 | 204 | 46.3 |
| | subsp. lyrata | | | |
| H_102_Al | Arabidopsis lyrata | 205 | 206 | 48 |
| | subsp. lyrata | | | |
| H_103_Al | Arabidopsis lyrata | 207 | 208 | 34.8 |
| | subsp. lyrata | | | |
| H_104_Al | Arabidopsis lyrata | 209 | 210 | 42.6 |
| | subsp. lyrata | | | |
| H_105_Al | Arabidopsis lyrata | 211 | 212 | 48.2 |
| | subsp. lyrata | | | |
| H_106_Sm | Selaginella | 213 | 214 | 33.4 |
| | moellendorffii | | | |
| H_107_Sm | Selaginella | 215 | 216 | 33.1 |
| | moellendorffii | | | |
| H_108_Sm | Selaginella | 217 | 218 | 38.5 |
| | moellendorffii | | | |
| H_109_Sm | Selaginella | 219 | 220 | 32.1 |
| | moellendorffii | | | |
| H_110_Sm | Selaginella | 221 | 222 | 30.2 |
| | moellendorffii | | | |
| H_111_Sm | Selaginella | 223 | 224 | 38.3 |
| | moellendorffii | | | |
| H_112_Gm | Glycine max | 225 | 226 | 34.6 |
| H_113_Gm | Glycine max | 227 | 228 | 46.5 |
| H_114_Gm | Glycine max | 229 | 230 | 47.9 |
| H_115_Gm | Glycine max | 231 | 232 | 47.6 |
| H_116_Gm | Glycine max | 233 | 234 | 48.7 |
| H_117_Gm | Glycine max | 235 | 236 | 34.7 |
| H_118_Gm | Glycine max | 237 | 238 | 38.7 |
| H_119_Gm | Glycine max | 239 | 240 | 50.6 |
| H_120_Gm | Glycine max | 241 | 242 | 45.5 |
| H_121_Gm | Glycine max | 243 | 244 | 47.3 |
| H_122_Gm | Glycine max | 245 | 246 | 36.8 |
| H_123_Gm | Glycine max | 247 | 248 | 37.1 |
| H_124_Gm | Glycine max | 249 | 250 | 37.3 |
| H_125_Gm | Glycine max | 251 | 252 | 38.6 |
| H_126_Gm | Glycine max | 253 | 254 | 37.8 |
| H_127_Gm | Glycine max | 255 | 256 | 47.2 |
| H_128_Gm | Glycine max | 257 | 258 | 35.7 |
| H_129_Gm | Glycine max | 259 | 260 | 31.9 |
| H_130_Gm | Glycine max | 261 | 262 | 43.2 |
| H_131_Gm | Glycine max | 263 | 264 | 50.5 |
| H_132_Bd | Brachypodium | 265 | 266 | 37.8 |
| | distachyon | | | |
| H_133_Bd | Brachypodium | 267 | 268 | 70.2 |
| | distachyon | | | |
| H_134_Bd | Brachypodium | 269 | 270 | 36.1 |
| | distachyon | | | |
| H_135_Bd | Brachypodium | 271 | 272 | 35.5 |
| | distachyon | | | |
| H_136_Bd | Brachypodium | 273 | 274 | 43.8 |
| | distachyon | | | |
| H_137_Bd | Brachypodium | 275 | 276 | 38.4 |
| | distachyon | | | |
| H_138_Bd | Brachypodium | 277 | 278 | 36.7 |
| | distachyon | | | |
| H_139_Bd | Brachypodium | 279 | 280 | 42.9 |
| | distachyon | | | |
| H_140_Bd | Brachypodium | 281 | 282 | 41.4 |
| | distachyon | | | |
| H_141_Bd | Brachypodium | 283 | 284 | 37.3 |
| | distachyon | | | |
| H_142_Bd | Brachypodium | 285 | 286 | 40.1 |
| | distachyon | | | |
| H_143_Mt | Medicago truncatula | 287 | 288 | 46.5 |
| H_144_Mt | Medicago truncatula | 289 | 290 | 36.7 |
| H_145_Mt | Medicago truncatula | 291 | 292 | 29.8 |
| H_146_Mt | Medicago truncatula | 293 | 294 | 46.7 |
| H_147_Mt | Medicago truncatula | 295 | 296 | 36.2 |
| H_148_Mt | Medicago truncatula | 297 | 298 | 35.4 |
| H_149_Mt | Medicago truncatula | 299 | 300 | 41.9 |
| H_150_Mt | Medicago truncatula | 301 | 302 | 46 |
| H_151_Mt | Medicago truncatula | 303 | 304 | 48 |
| H_152_Mt | Medicago truncatula | 305 | 306 | 38 |
| H_153_Mt | Medicago truncatula | 307 | 308 | 37.9 |
| H_154_Ls | Lactuca sativa | 309 | 310 | 37.1 |
| H_155_Os | Oryza sativa | 311 | 312 | 38.6 |
| | subsp. indica | | | |
| H_156_Vv | Vitis vinifera | 313 | 314 | 36.9 |
| H_157_Vv | Vitis vinifera | 315 | 316 | 50 |
| H_158_Ps | Picea sitchensis | 317 | 318 | 41.3 |
| H_159_Ps | Picea sitchensis | 319 | 320 | 41.3 |
| H_160_Ps | Picea sitchensis | 321 | 322 | 39.7 |
| H_161_Pt | Populus trichocarpa | 323 | 324 | 38.6 |
| H_162_Lc | Litchi chinensis | 325 | 326 | 39 |
| H_163_Sb | Sorghum bicolor | 327 | 328 | 39 |
| H_164_Zm | Zea mays | 329 | 330 | 40.2 |
| H_165_Zm | Zea mays | 331 | 332 | 41 |
| H_166_Mt | Medicago truncatula | 333 | 334 | 38.3 |
| H_167_Ps | Picea sitchensis | 335 | 336 | 44.4 |
| H_168_At | Arabidopsis thaliana | 337 | 338 | 47.1 |
| H_169_Zm | Zea mays | 339 | 340 | 38.2 |
| H_170_Ps | Picea sitchensis | 341 | 342 | 39.5 |
| H_171_Hv | Hordeum vulgare | 343 | 344 | 35 |
| | var. distichum | | | |
| H_172_Hv | Hordeum vulgare | 345 | 346 | 37.2 |
| | var. distichum | | | |
| H_173_Hv | Hordeum vulgare | 347 | 348 | 44.9 |
| | var. distichum | | | |
| H_174_Hv | Hordeum vulgare | 349 | 350 | 38 |
| | var. distichum | | | |
| H_175_Hv | Hordeum vulgare | 351 | 352 | 38.7 |
| | var. distichum | | | |
| H_176_Hv | Hordeum vulgare | 353 | 354 | 38.8 |
| | var. distichum | | | |
| H_177_Hv | Hordeum vulgare | 355 | 356 | 38.7 |
| | var. distichum | | | |
| H_178_Hv | Hordeum vulgare | 357 | 358 | 39.8 |
| | var. distichum | | | |
| H_179_Pt | Populus trichocarpa | 359 | 360 | 37.3 |
| H_180_Gm | Glycine max | 361 | 362 | 42.9 |
| H_181_Gm | Glycine max | 363 | 364 | 38.8 |
| H_182_Lj | Lotus japonicus | 365 | 366 | 49.8 |
| H_183_Lj | Lotus japonicus | 367 | 368 | 36 |
| H_184_Mt | Medicago truncatula | 369 | 370 | 49.3 |
| H_185_Mt | Medicago truncatula | 371 | 372 | 38.1 |
| H_186_Mt | Medicago truncatula | 373 | 374 | 46.3 |
| H_187_Lj | Lotus japonicus | 375 | 376 | 39.2 |
| H_188_Mt | Medicago truncatula | 377 | 378 | 46.7 |
| H_189_At | Arabidopsis thaliana | 379 | 380 | 45 |
| H_190_At | Arabidopsis thaliana | 381 | 382 | 40.6 |
| H_191_Os | Oryza sativa | 383 | 384 | 40 |
| H_192_Vr | Vigna radiata | 385 | 386 | 39.6 |
| | var. radiata | | | |
| H_193_At | Arabidopsis thaliana | 387 | 388 | 43.4 |
| H_194_Os | Oryza sativa | 389 | 390 | 37.2 |
| | subsp. japonica | | | |
| H_195_Os | Oryza sativa | 391 | 392 | 37.9 |
| | subsp. japonica | | | |
| H_196_At | Arabidopsis thaliana | 393 | 394 | 47.5 |
| H_197_At | Arabidopsis thaliana | 395 | 396 | 36.4 |
| H_198_At | Arabidopsis thaliana | 397 | 398 | 48.6 |
| H_199_Bn | Brassica napus | 399 | 400 | 37.7 |
| H_200_Bn | Brassica napus | 401 | 402 | 36.6 |
| H_201_Bn | Brassica napus | 403 | 404 | 45.5 |
| H_202_Bn | Brassica napus | 405 | 406 | 47.6 |
| H_203_Bn | Brassica napus | 407 | 408 | 47.2 |
| H_204_Bn | Brassica napus | 409 | 410 | 37.3 |
| H_205_Bn | Brassica napus | 411 | 412 | 43.5 |
| H_206_Bn | Brassica napus | 413 | 414 | 37.8 |
| H_207_Bn | Brassica napus | 415 | 416 | 37.7 |
| H_208_Gm | Glycine max | 417 | 418 | 37.1 |
| H_209_Gm | Glycine max | 419 | 420 | 38.4 |
| H_210_Gm | Glycine max | 421 | 422 | 38.8 |
| H_211_Gm | Glycine max | 423 | 424 | 50.6 |
| H_212_Gm | Glycine max | 425 | 426 | 45.5 |
| H_213_Gm | Glycine max | 427 | 428 | 48.2 |
| H_214_Gm | Glycine max | 429 | 430 | 50.6 |
| H_215_Ha | Helianthus annuus | 431 | 432 | 46.7 |
| H_216_Hv | Hordeum vulgare | 433 | 434 | 34.8 |
| H_217_Os | Oryza sativa | 435 | 436 | 39.5 |
| H_218_Ta | Triticum aestivum | 437 | 438 | 40.4 |
| H_219_Ta | Triticum aestivum | 439 | 440 | 38.5 |
| H_220_Ta | Triticum aestivum | 441 | 442 | 34.5 |
| H_221_Zm | Zea mays | 443 | 444 | 37.8 |
| H_222_Zm | Zea mays | 445 | 446 | 39 |
| H_223_Zm | Zea mays | 447 | 448 | 40.2 |
| H_224_Zm | Zea mays | 449 | 450 | 39 |
| H_225_Zm | Zea mays | 451 | 452 | 37.8 |

[0380] Sequences have been tentatively assembled and publicly disclosed by research institutions, such as The Institute for Genomic Research (TIGR; beginning with TA). For instance, the Eukaryotic Gene Orthologs (EGO) database may be used to identify such related sequences, either by keyword search or by using the BLAST algorithm with the nucleic acid sequence or polypeptide sequence of interest. Special nucleic acid sequence databases have been created for particular organisms, e.g. for certain prokaryotic organisms, such as by the Joint Genome Institute. Furthermore, access to proprietary databases, has allowed the identification of novel nucleic acid and polypeptide sequences.

### Example 2

### Alignment of PAE1 Polypeptide Sequences

[0381] Alignment of the polypeptide sequences may be performed using the ClustalW 2.0 algorithm of progressive alignment (Thompson et al. (1997) Nucleic Acids Res 25:4876-4882; Chenna et al. (2003). Nucleic Acids Res 31:3497-3500 & Larkin M A, Blackshields G, Brown N P, Chenna R, McGettigan P A, McWilliam H, Valentin F, Wallace I M, Wilm A, Lopez R, Thompson J D, Gibson T J, Higgins D G. (2007). Clustal W and Clustal X version 2.0. Bioinformatics, 23, 2947-2948) with standard setting (slow alignment, similarity matrix: Gonnet, gap opening penalty 10, gap extension penalty: 0.2). Minor manual editing was done to further optimise the alignment.

### Example 3

### Calculation of Global Percentage Identity Between Polypeptide Sequences

[0382] Global percentages of similarity and identity between full length polypeptide sequences useful in performing the methods of the invention were determined using MatGAT (Matrix Global Alignment Tool) software (BMC Bioinformatics. 2003 4:29. MatGAT: an application that generates similarity/identity matrices using protein or DNA sequences. Campanella J J, Bitincka L, Smalley J; software hosted by Ledion Bitincka). MatGAT generates similarity/identity matrices for DNA or protein sequences without needing pre-alignment of the data. The program performs a series of pair-wise alignments using the Myers and Miller global alignment algorithm, calculates similarity and identity, and then places the results in a distance matrix.

[0383] Results of MatGAT analysis are shown in Table A above, comparing the full length of the Os_PAE protein of the present invention (SEQ ID NO: 2), and a list of amino acid sequences related to SEQ ID NO: 2. Sequence identity (%) is shown. Parameters used in the analysis were: Scoring matrix: Blosum62, First Gap: 12, Extending Gap: 2. The sequence identity (in %) between the PAE1 polypeptide sequences useful in performing the methods of the invention can be as low as 28% (is generally higher than 28%) compared to SEQ ID NO: 2.

[0384] Like for full length sequences, a MATGAT table based on subsequences of a specific domain, may be generated. Based on a multiple alignment of PAE1 polypeptides, such as for example using the methods outlines in Example 2, a skilled person may select conserved sequences and submit as input for a MaTGAT analysis.

### Example 4

### Identification of Domains Comprised in Polypeptide Sequences Useful in Performing the Methods of the Invention

[0385] The Integrated Resource of Protein Families, Domains and Sites (InterPro) database is an integrated interface for the commonly used signature databases for text- and sequence-based searches. The InterPro database combines these databases, which use different methodologies and varying degrees of biological information about well-characterized proteins to derive protein signatures. Collaborating databases include SWISS-PROT, PROSITE, TrEMBL, PRINTS, ProDom and Pfam, Smart and TIGRFAMs. Pfam is a large collection of multiple sequence alignments and hidden Markov models covering many common protein domains and families. Pfam is hosted at the Sanger Institute server in the United Kingdom (the Welcome Trust SANGER Institute, Hinxton, England, UK (http://pfam.sanger.ac.uk/)). Interpro is hosted at the European Bioinformatics Institute in the United Kingdom.

[0386] The results of the InterPro scan (see Zdobnov E. M. and Apweiler R.; “InterProScan—an integration platform for the signature-recognition methods in InterPro.”; Bioinformatics, 2001, 17(9): 847-8; InterPro database, release 42.0) of the polypeptide sequence as represented by SEQ ID NO: 2 are presented in Table B. Default parameters (DB genetic code=standard; transcript length=20) were used.

TABLE B
InterPro scan results (major accession numbers) of the
polypeptide sequence as represented by SEQ ID NO: 2.

| | | | Amino acid |
|---|---|---|---|
| | Accession | Accession | coordinates on |
| Database | number | name | SEQ ID NO 2 |
| Interpro | HMMPanther: | PECTIN | 38 to 327 |
| | PTHR21562: SF1 | ACETYLESTERASE | |
| Interpro | PFAM PF03283 | PAE | 29 to 331 |

### Example 5

### Topology Prediction of the PAE1 Polypeptide Sequences

[0387] TargetP 1.1 predicts the subcellular location of eukaryotic proteins. The location assignment is based on the predicted presence of any of the N-terminal pre-sequences: chloroplast transit peptide (cTP), mitochondrial targeting peptide (mTP) or secretory pathway signal peptide (SP). Scores on which the final prediction is based are not really probabilities, and they do not necessarily add to one. However, the location with the highest score is the most likely according to TargetP, and the relationship between the scores (the reliability class) may be an indication of how certain the prediction is. The reliability class (RC) ranges from 1 to 5, where 1 indicates the strongest prediction. For the sequences predicted to contain an N-terminal presequence a potential cleavage site can also be predicted. TargetP is maintained at the server of the Technical University of Denmark (see http://www.cbs.dtu.dk/services/TargetP/ & “Locating proteins in the cell using TargetP, SignalP, and related tools”, Olof Emanuelsson, Søren Brunak, Gunnar von Heijne, Henrik Nielsen, Nature Protocols 2, 953-971 (2007)).

[0388] A number of parameters must be selected before analysing a sequence, such as organism group (non-plant or plant), cutoff sets (none, predefined set of cutoffs, or user-specified set of cutoffs), and the calculation of prediction of cleavage sites (yes or no). TargetP settings were: “plant”; cutoff cTP=0; cutoff mTP=0; cutoff SP=0; cutoff other=0. Cleavage site predictions included.

[0389] The results of TargetP 1.1 analysis of the polypeptide sequence as represented by SEQ ID NO: 2 are presented Table C. The “plant” organism group has been selected, no cutoffs defined, and the predicted length of the transit peptide requested. The subcellular localization of the polypeptide sequence as represented by SEQ ID NO: 2 may be the cytoplasm or nucleus.

TABLE C
TargetP 1.1 analysis of the polypeptide
sequence as represented by SEQ ID NO: 2

| | |
|---|---|
| Length (AA) | 333 |
| Chloroplastic transit peptide | 0.014 |
| Mitochondrial transit peptide | 0.024 |
| Secretory pathway signal peptide | 0.891 |
| Other subcellular targeting | 0.065 |
| Predicted Location | S |
| Reliability class | 1 |
| Predicted transit peptide length | 21 |

[0390] Many other algorithms can be used to perform such analyses, including:
[0391] ChloroP 1.1 hosted on the server of the Technical University of Denmark;
[0392] Protein Prowler Subcellular Localisation Predictor version 1.2 hosted on the server of the Institute for Molecular Bioscience, University of Queensland, Brisbane, Australia;
[0393] PENCE Proteome Analyst PA-GOSUB 2.5 hosted on the server of the University of Alberta, Edmonton, Alberta, Canada;
[0394] TMHMM, hosted on the server of the Technical University of Denmark
[0395] PSORT (URL: psort.org)
[0396] PLOC (Park and Kanehisa, Bioinformatics, 19, 1656-1663, 2003).

### Example 6

### Cloning of the PAE1 Encoding Nucleic Acid Sequence

[0397] The nucleic acid sequence was amplified by PCR using as template a custom-made Oryza sativa cDNA library.

[0398] PCR was performed using a commercially available proofreading Taq DNA polymerase in standard conditions, using 200 ng of template in a 50 μl PCR mix. The primers used were prm00309 (SEQ ID NO: 453; sense, start codon in bold): 5′-GGGGACAAGTTTGTACAAAA AAGCAGGCTTCACAATGGATAAACAACCGGCG-3′ and prm00310 (SEQ ID NO: 454; reverse, complementary): 5′-GGGGACCACTTTGTACAAGAAAGCTGGGTCCAAGGTCAG GGGAATTC-3′, which include the AttB sites for Gateway recombination. The amplified PCR fragment was purified also using standard methods. The first step of the Gateway procedure, the BP reaction, was then performed, during which the PCR fragment recombined in vivo with the pDONR201 plasmid to produce, according to the Gateway terminology, an “entry clone”, pPAE1. Plasmid pDONR201 was purchased from Invitrogen (Life Technologies GmbH, Frankfurter Straβe 129B, 64293 Darmstadt, Germany), as part of the Gateway® technology.

[0399] The entry clone comprising SEQ ID NO: 1 was then used in an LR reaction with a destination vector used for Oryza sativa transformation. This vector contained as functional elements within the T-DNA borders: a plant selectable marker; a screenable marker expression cassette; and a Gateway cassette intended for LR in vivo recombination with the nucleic acid sequence of interest already cloned in the entry clone. A rice GOS2 promoter (SEQ ID NO: 469) for constitutive expression was located upstream of this Gateway cassette.

[0400] After the LR recombination step, the resulting expression vector pGOS2:PAE1 (FIG. 2) was transformed into Agrobacterium strain LBA4044 according to methods well known in the art.

### Example 7

### Plant Transformation

### Rice Transformation

[0401] The Agrobacterium containing the expression vector was used to transform Oryza sativa plants. Mature dry seeds of the rice japonica cultivar Nipponbare were dehusked. Sterilization was carried out by incubating for one minute in 70% ethanol, followed by 30 to 60 minutes, preferably 30 minutes in sodium hypochlorite solution (depending on the grade of contamination), followed by a 3 to 6 times, preferably 4 time wash with sterile distilled water. The sterile seeds were then germinated on a medium containing 2,4-D (callus induction medium). After incubation in light for 6 days scutellum-derived calli is transformed with Agrobacterium as described herein below.

[0402] Agrobacterium strain LBA4404 containing the expression vector was used for co-cultivation. Agrobacterium was inoculated on AB medium with the appropriate antibiotics and cultured for 3 days at 28° C. The bacteria were then collected and suspended in liquid co-cultivation medium to a density (0D600) of about 1. The calli were immersed in the suspension for 1 to 15 minutes. The callus tissues were then blotted dry on a filter paper and transferred to solidified, co-cultivation medium and incubated for 3 days in the dark at 25° C. After washing away the Agrobacterium, the calli were grown on 2,4-D-containing medium for 10 to 14 days (growth time for indica: 3 weeks) under light at 28° C.-32° C. in the presence of a selection agent. During this period, rapidly growing resistant callus developed. After transfer of this material to regeneration media, the embryogenic potential was released and shoots developed in the next four to six weeks. Shoots were excised from the calli and incubated for 2 to 3 weeks on an auxin-containing medium from which they were transferred to soil. Hardened shoots were grown under high humidity and short days in a greenhouse.

[0403] Transformation of rice cultivar indica can also be done in a similar way as give above according to techniques well known to a skilled person. 35 to 90 independent T0 rice transformants were generated for one construct. The primary transformants were transferred from a tissue culture chamber to a greenhouse. After a quantitative PCR analysis to verify copy number of the T-DNA insert, only single copy transgenic plants that exhibit tolerance to the selection agent were kept for harvest of T1 seed. Seeds were then harvested three to five months after transplanting. The method yielded single locus transformants at a rate of over 50% (Aldemita and Hodges1996, Chan et al. 1993, Hiei et al. 1994).

### Example 8

### Transformation of Other Crops

### Corn Transformation

[0404] Transformation of maize (Zea mays) is performed with a modification of the method described by Ishida et al. (1996) Nature Biotech 14(6): 745-50. Transformation is genotype-dependent in corn and only specific genotypes are amenable to transformation and regeneration. The inbred line A188 (University of Minnesota) or hybrids with A188 as a parent are good sources of donor material for transformation, but other genotypes can be used successfully as well. Ears are harvested from corn plant approximately 11 days after pollination (DAP) when the length of the immature embryo is about 1 to 1.2 mm. Immature embryos are cocultivated with Agrobacterium tumefaciens containing the expression vector, and transgenic plants are recovered through organogenesis. Excised embryos are grown on callus induction medium, then maize regeneration medium, containing the selection agent (for example imidazolinone but various selection markers can be used). The Petri plates are incubated in the light at 25° C. for 2-3 weeks, or until shoots develop. The green shoots are transferred from each embryo to maize rooting medium and incubated at 25° C. for 2-3 weeks, until roots develop. The rooted shoots are transplanted to soil in the greenhouse. T1 seeds are produced from plants that exhibit tolerance to the selection agent and that contain a single copy of the T-DNA insert.

### Wheat Transformation

[0405] Transformation of wheat is performed with the method described by Ishida et al. (1996) Nature Biotech 14(6): 745-50. The cultivar Bobwhite (available from CIMMYT, Apdo. Postal 6-641 06600 Mexico, D. F., Mexico) is commonly used in transformation. Immature embryos are co-cultivated with Agrobacterium tumefaciens containing the expression vector, and transgenic plants are recovered through organogenesis. After incubation with Agrobacterium, the embryos are grown in vitro on callus induction medium, then regeneration medium, containing the selection agent (for example imidazolinone but various selection markers can be used). The Petri plates are incubated in the light at 25° C. for 2-3 weeks, or until shoots develop. The green shoots are transferred from each embryo to rooting medium and incubated at 25° C. for 2-3 weeks, until roots develop. The rooted shoots are transplanted to soil in the greenhouse. T1 seeds are produced from plants that exhibit tolerance to the selection agent and that contain a single copy of the T-DNA insert.

### Soybean Transformation

[0406] Soybean is transformed according to a modification of the method described in the Texas A&M patent U.S. Pat. No. 5,164,310. Several commercial soybean varieties are amenable to transformation by this method. The cultivar Jack (available from the Illinois Seed foundation) is commonly used for transformation. Soybean seeds are sterilised for in vitro sowing. The hypocotyl, the radicle and one cotyledon are excised from seven-day old young seedlings. The epicotyl and the remaining cotyledon are further grown to develop axillary nodes. These axillary nodes are excised and incubated with Agrobacterium tumefaciens containing the expression vector. After the cocultivation treatment, the explants are washed and transferred to selection media. Regenerated shoots are excised and placed on a shoot elongation medium. Shoots no longer than 1 cm are placed on rooting medium until roots develop. The rooted shoots are transplanted to soil in the greenhouse. T1 seeds are produced from plants that exhibit tolerance to the selection agent and that contain a single copy of the T-DNA insert.

### Rapeseed/Canola Transformation

[0407] Cotyledonary petioles and hypocotyls of 5-6 day old young seedling are used as explants for tissue culture and transformed according to Babic et al. (1998, Plant Cell Rep 17: 183-188). The commercial cultivar Westar (Agriculture Canada) is the standard variety used for transformation, but other varieties can also be used. Canola seeds are surface-sterilized for in vitro sowing. The cotyledon petiole explants with the cotyledon attached are excised from the in vitro seedlings, and inoculated with Agrobacterium (containing the expression vector) by dipping the cut end of the petiole explant into the bacterial suspension. The explants are then cultured for 2 days on MSBAP-3 medium containing 3 mg/l BAP, 3% sucrose, 0.7% Phytagar at 23° C., 16 hr light. After two days of co-cultivation with Agrobacterium, the petiole explants are transferred to MSBAP-3 medium containing 3 mg/l BAP, cefotaxime, carbenicillin, or timentin (300 mg/l) for 7 days, and then cultured on MSBAP-3 medium with cefotaxime, carbenicillin, or timentin and selection agent until shoot regeneration. When the shoots are 5-10 mm in length, they are cut and transferred to shoot elongation medium (MSBAP-0.5, containing 0.5 mg/l BAP). Shoots of about 2 cm in length are transferred to the rooting medium (MS0) for root induction. The rooted shoots are transplanted to soil in the greenhouse. T1 seeds are produced from plants that exhibit tolerance to the selection agent and that contain a single copy of the T-DNA insert.

### Alfalfa Transformation

[0408] A regenerating clone of alfalfa (Medicago sativa) is transformed using the method of (McKersie et al., 1999 Plant Physiol 119: 839-847). Regeneration and transformation of alfalfa is genotype dependent and therefore a regenerating plant is required. Methods to obtain regenerating plants have been described. For example, these can be selected from the cultivar Rangelander (Agriculture Canada) or any other commercial alfalfa variety as described by Brown DCW and A Atanassov (1985. Plant Cell Tissue Organ Culture 4: 111-112). Alternatively, the RA3 variety (University of Wisconsin) has been selected for use in tissue culture (Walker et al., 1978 Am J Bot 65:654-659). Petiole explants are cocultivated with an overnight culture of Agrobacterium tumefaciens C58C1 pMP90 (McKersie et al., 1999 Plant Physiol 119: 839-847) or LBA4404 containing the expression vector. The explants are cocultivated for 3 d in the dark on SH induction medium containing 288 mg/L Pro, 53 mg/L thioproline, 4.35 g/L K2SO4, and 100 μm acetosyringinone. The explants are washed in half-strength Murashige-Skoog medium (Murashige and Skoog, 1962) and plated on the same SH induction medium without acetosyringinone but with a suitable selection agent and suitable antibiotic to inhibit Agrobacterium growth. After several weeks, somatic embryos are transferred to BOi2Y development medium containing no growth regulators, no antibiotics, and 50 g/L sucrose. Somatic embryos are subsequently germinated on half-strength Murashige-Skoog medium. Rooted seedlings were transplanted into pots and grown in a greenhouse. T1 seeds are produced from plants that exhibit tolerance to the selection agent and that contain a single copy of the T-DNA insert.

### Cotton Transformation

[0409] Cotton is transformed using Agrobacterium tumefaciens according to the method described in U.S. Pat. No. 5,159,135. Cotton seeds are surface sterilised in 3% sodium hypochlorite solution during 20 minutes and washed in distilled water with 500 μg/ml cefotaxime. The seeds are then transferred to SH-medium with 50 μg/ml benomyl for germination. Hypocotyls of 4 to 6 days old seedlings are removed, cut into 0.5 cm pieces and are placed on 0.8% agar. An Agrobacterium suspension (approx. 108 cells per ml, diluted from an overnight culture transformed with the gene of interest and suitable selection markers) is used for inoculation of the hypocotyl explants. After 3 days at room temperature and lighting, the tissues are transferred to a solid medium (1.6 g/l Gelrite) with Murashige and Skoog salts with B5 vitamins (Gamborg et al., Exp. Cell Res. 50:151-158 (1968)), 0.1 mg/l 2,4-D, 0.1 mg/l 6-furfurylaminopurine and 750 μg/ml MgCL2, and with 50 to 100 μg/ml cefotaxime and 400-500 μg/ml carbenicillin to kill residual bacteria. Individual cell lines are isolated after two to three months (with subcultures every four to six weeks) and are further cultivated on selective medium for tissue amplification (30° C., 16 hr photoperiod). Transformed tissues are subsequently further cultivated on non-selective medium during 2 to 3 months to give rise to somatic embryos. Healthy looking embryos of at least 4 mm length are transferred to tubes with SH medium in fine vermiculite, supplemented with 0.1 mg/l indole acetic acid, 6 furfurylaminopurine and gibberellic acid. The embryos are cultivated at 30° C. with a photoperiod of 16 hrs, and plantlets at the 2 to 3 leaf stage are transferred to pots with vermiculite and nutrients. The plants are hardened and subsequently moved to the greenhouse for further cultivation.

### Sugarbeet Transformation

[0410] Seeds of sugarbeet (Beta vulgaris L.) are sterilized in 70% ethanol for one minute followed by 20 min. shaking in 20% Hypochlorite bleach e.g. Clorox® regular bleach (commercially available from Clorox, 1221 Broadway, Oakland, Calif. 94612, USA). Seeds are rinsed with sterile water and air dried followed by plating onto germinating medium (Murashige and Skoog (MS) based medium (Murashige, T., and Skoog., 1962. Physiol. Plant, vol. 15, 473-497) including B5 vitamins (Gamborg et al.; Exp. Cell Res., vol. 50, 151-8.) supplemented with 10 g/l sucrose and 0.8% agar). Hypocotyl tissue is used essentially for the initiation of shoot cultures according to Hussey and Hepher (Hussey, G., and Hepher, A., 1978. Annals of Botany, 42, 477-9) and are maintained on MS based medium supplemented with 30 g/l sucrose plus 0.25 mg/l benzylamino purine and 0.75% agar, pH 5.8 at 23-25° C. with a 16-hour photoperiod. Agrobacterium tumefaciens strain carrying a binary plasmid harbouring a selectable marker gene, for example nptll, is used in transformation experiments. One day before transformation, a liquid LB culture including antibiotics is grown on a shaker (28° C., 150 rpm) until an optical density (O.D.) at 600 nm of ˜1 is reached. Overnight-grown bacterial cultures are centrifuged and resuspended in inoculation medium (O.D. ˜1) including Acetosyringone, pH 5.5. Shoot base tissue is cut into slices (1.0 cm×1.0 cm×2.0 mm approximately). Tissue is immersed for 30 s in liquid bacterial inoculation medium. Excess liquid is removed by filter paper blotting. Co-cultivation occurred for 24-72 hours on MS based medium incl. 30 g/l sucrose followed by a non-selective period including MS based medium, 30 g/l sucrose with 1 mg/l BAP to induce shoot development and cefotaxim for eliminating the Agrobacterium. After 3-10 days explants are transferred to similar selective medium harbouring for example kanamycin or G418 (50-100 mg/l genotype dependent). Tissues are transferred to fresh medium every 2-3 weeks to maintain selection pressure. The very rapid initiation of shoots (after 3-4 days) indicates regeneration of existing meristems rather than organogenesis of newly developed transgenic meristems. Small shoots are transferred after several rounds of subculture to root induction medium containing 5 mg/l NAA and kanamycin or G418. Additional steps are taken to reduce the potential of generating transformed plants that are chimeric (partially transgenic). Tissue samples from regenerated shoots are used for DNA analysis. Other transformation methods for sugarbeet are known in the art, for example those by Linsey & Gallois (Linsey, K., and Gallois, P., 1990. Journal of Experimental Botany; vol. 41, No. 226; 529-36) or the methods published in the international application published as W09623891A.

### Sugarcane Transformation

[0411] Spindles are isolated from 6-month-old field grown sugarcane plants (Arencibia et al., 1998. Transgenic Research, vol. 7, 213-22; Enriquez-Obregon et al., 1998. Planta, vol. 206, 20-27). Material is sterilized by immersion in a 20% Hypochlorite bleach e.g. Clorox® regular bleach (commercially available from Clorox, 1221 Broadway, Oakland, Calif. 94612, USA) for 20 minutes. Transverse sections around 0.5 cm are placed on the medium in the top-up direction. Plant material is cultivated for 4 weeks on MS (Murashige, T., and Skoog., 1962. Physiol. Plant, vol. 15, 473-497) based medium incl. B5 vitamins (Gamborg, O., et al., 1968. Exp. Cell Res., vol. 50, 151-8) supplemented with 20 g/l sucrose, 500 mg/l casein hydrolysate, 0.8% agar and 5 mg/l 2,4-D at 23° C. in the dark. Cultures are transferred after 4 weeks onto identical fresh medium. Agrobacterium tumefaciens strain carrying a binary plasmid harbouring a selectable marker gene, for example hpt, is used in transformation experiments. One day before transformation, a liquid LB culture including antibiotics is grown on a shaker (28° C., 150 rpm) until an optical density (O.D.) at 600 nm of ˜0.6 is reached. Overnight-grown bacterial cultures are centrifuged and resuspended in MS based inoculation medium (O.D. ˜0.4) including acetosyringone, pH 5.5. Sugarcane embryogenic callus pieces (2-4 mm) are isolated based on morphological characteristics as compact structure and yellow colour and dried for 20 min. in the flow hood followed by immersion in a liquid bacterial inoculation medium for 10-20 minutes. Excess liquid is removed by filter paper blotting. Co-cultivation occurred for 3-5 days in the dark on filter paper which is placed on top of MS based medium incl. B5 vitamins containing 1 mg/l 2,4-D. After co-cultivation calli are washed with sterile water followed by a non-selective cultivation period on similar medium containing 500 mg/l cefotaxime for eliminating remaining Agrobacterium cells. After 3-10 days explants are transferred to MS based selective medium incl. B5 vitamins containing 1 mg/l 2,4-D for another 3 weeks harbouring 25 mg/l of hygromycin (genotype dependent). All treatments are made at 23° C. under dark conditions. Resistant calli are further cultivated on medium lacking 2,4-D including 1 mg/l BA and 25 mg/l hygromycin under 16 h light photoperiod resulting in the development of shoot structures. Shoots are isolated and cultivated on selective rooting medium (MS based including, 20 g/l sucrose, 20 mg/l hygromycin and 500 mg/l cefotaxime). Tissue samples from regenerated shoots are used for DNA analysis. Other transformation methods for sugarcane are known in the art, for example from the international application published as WO2010/151634A and the granted European patent EP1831378.

[0412] For transformation by particle bombardment the induction of callus and the transformation of sugarcane can be carried out by the method of Snyman et al. (Snyman et al., 1996, S. Afr. J. Bot 62, 151-154). The construct can be cotransformed with the vector pEmuKN, which expressed the npt[pi] gene (Beck et al. Gene 19, 1982, 327-336; Gen-Bank Accession No. V00618) under the control of the pEmu promoter (Last et al. (1991) Theor. Appl. Genet. 81, 581-588). Plants are regenerated by the method of Snyman et al. 2001 (Acta Horticulturae 560, (2001), 105-108).

### Example 9

### Phenotypic Evaluation Procedure

### 9.1 Evaluation Setup

[0413] 35 to 90 independent T0 rice transformants were generated. The primary transformants were transferred from a tissue culture chamber to a greenhouse for growing and harvest of T1 seed. Six events, of which the T1 progeny segregated 3:1 for presence/absence of the transgene, were retained. For each of these events, approximately 10 T1 seedlings containing the transgene (hetero- and homo-zygotes) and approximately 10 T1 seedlings lacking the transgene (nullizygotes) were selected by monitoring visual marker expression. The transgenic plants and the corresponding nullizygotes were grown side-by-side at random positions. Greenhouse conditions were of shorts days (12 hours light), 28° C. in the light and 22° C. in the dark, and a relative humidity of 70%. Plants grown under non-stress conditions were watered at regular intervals to ensure that water and nutrients were not limiting and to satisfy plant needs to complete growth and development, unless they were used in a stress screen.

[0414] From the stage of sowing until the stage of maturity the plants were passed several times through a digital imaging cabinet. At each time Point digital images (2048×1536 pixels, 16 million colours) were taken of each plant from at least 6 different angles.

[0415] T1 events can be further evaluated in the T2 generation following the same evaluation procedure as for the T1 generation, e.g. with less events and/or with more individuals per event.

### Drought Screen

### T1 or T2

[0416] plants were germinated under normal conditions and transferred into potting soil as normally. After potting the plants in their pots were then transferred to a “dry” section where irrigation was withheld. Soil moisture probes were inserted in randomly chosen pots to monitor the soil water content (SWC). When SWC went below certain thresholds, the plants were automatically re-watered continuously until a normal level was reached again. The plants were then re-transferred again to normal conditions. The drought cycle was repeated two times during the vegetative stage with the second cycle starting shortly after re-watering after the first drought cycle was complete. The plants were imaged before and after each drought cycle.

[0417] The rest of the cultivation (plant maturation, seed harvest) was the same as for plants not grown under abiotic stress conditions. Growth and yield parameters were recorded as detailed for growth under normal conditions.

### Reproductive Drought Screen

[0418] T1 or T2 plants are grown in potting soil under normal conditions until they approached the heading stage. They are then transferred to a “dry” section where irrigation is withheld. Soil moisture probes are inserted in randomly chosen pots to monitor the soil water content (SWC). When SWC goes below certain thresholds, the plants are automatically re-watered continuously until a normal level is reached again. The plants are then re-transferred again to normal conditions. The rest of the cultivation (plant maturation, seed harvest) is the same as for plants not grown under abiotic stress conditions. Growth and yield parameters are recorded as detailed for growth under normal conditions.

### Nitrogen Use Efficiency Screen

[0419] T1 or T2 plants are grown in potting soil under normal conditions except for the nutrient solution. The pots are watered from transplantation to maturation with a specific nutrient solution containing reduced N nitrogen (N) content, usually between 7 to 8 times less. The rest of the cultivation (plant maturation, seed harvest) is the same as for plants not grown under abiotic stress. Growth and yield parameters are recorded as detailed for growth under normal conditions.

### Salt Stress Screen

[0420] T1 or T2 plants are grown on a substrate made of coco fibers and particles of baked clay (Argex) (3 to 1 ratio). A normal nutrient solution is used during the first two weeks after transplanting the plantlets in the greenhouse. After the first two weeks, 25 mM of salt (NaCl) is added to the nutrient solution, until the plants are harvested. Growth and yield parameters are recorded as detailed for growth under normal conditions.

### 9.2 Statistical Analysis: F Test

[0421] A two factor ANOVA (analysis of variants) was used as a statistical model for the overall evaluation of plant phenotypic characteristics. An F test was carried out on all the parameters measured of all the plants of all the events transformed with the gene of the present invention. The F test was carried out to check for an effect of the gene over all the transformation events and to verify for an overall effect of the gene, also known as a global gene effect. The threshold for significance for a true global gene effect was set at a 5% probability level for the F test. A significant F test value Points to a gene effect, meaning that it is not only the mere presence or position of the gene that is causing the differences in phenotype.

### 9.3 Parameters Measured

[0422] From the stage of sowing until the stage of maturity the plants were passed several times through a digital imaging cabinet. At each time Point digital images (2048×1536 pixels, 16 million colours) were taken of each plant from at least 6 different angles as described in WO2010/031780. These measurements were used to determine different parameters.

### Biomass-Related Parameter Measurement

[0423] The plant aboveground area (or green biomass) was determined by counting the total number of pixels on the digital images from aboveground plant parts discriminated from the background. This value was averaged for the pictures taken on the same time point from the different angles and was converted to a physical surface value expressed in square mm by calibration. Experiments show that the aboveground plant area measured this way correlates with the biomass of plant parts above ground. The above ground area is the area measured at the time point at which the plant had reached its maximal leafy biomass.

[0424] Increase in root biomass is expressed as an increase in total root biomass (measured as maximum biomass of roots observed during the lifespan of a plant); or as an increase in the root/shoot index, measured as the ratio between root mass and shoot mass in the period of active growth of root and shoot. In other words, the root/shoot index is defined as the ratio of the rapidity of root growth to the rapidity of shoot growth in the period of active growth of root and shoot. Root biomass can be determined using a method as described in WO 2006/029987. Root biomass of rice plants may serve as an indicator for biomass of belowground and/or root derived organs in other plants, for example the beet biomass in sugar beet or tubers of potato.

[0425] The absolute height can be measured (“HeightMax”). A alternative robust indication of the height of the plant is the measurement of the location of the centre of gravity, i.e. determining the height (in mm) of the gravity centre of the above-ground, green biomass. This avoids influence by a single erect leaf, based on the asymptote of curve fitting or, if the fit is not satisfactory, based on the absolute maximum (“GravityYMax”)

### Parameters Related to Development Time

[0426] The early vigour is the plant aboveground area three weeks post-germination. Early vigour was determined by counting the total number of pixels from aboveground plant parts discriminated from the background. This value was averaged for the pictures taken on the same time Point from different angles and was converted to a physical surface value expressed in square mm by calibration.

[0427] Early seedling vigour is the seedling aboveground area a few weeks after germination (plantlets of about 4 cm high).

[0428] “EmerVigor” is an indication of early plant growth. It is the above-ground biomass of the plant one week after re-potting the established seedlings from their germination trays into their final pots. It is the area (in mm²) covered by leafy biomass in the imaging. It was determined by counting the total number of pixels from aboveground plant parts discriminated from the background. This value was averaged for the pictures taken on the same time point from different angles and was converted to a physical surface value expressed in square mm by calibration.

[0429] AreaEmer is an indication of quick early development when this value is decreased compared to control plants. It is the ratio (expressed in %) between the time a plant needs to make 30% of the final biomass and the time needs to make 90% of its final biomass.

[0430] The “time to flower” or “flowering time” of the plant can be determined using the method as described in WO 2007/093444.

[0431] The relative growth rate (“RGR”) as the the natural logarithm of the above ground biomass measured (called ‘TotalArea’) at a second time point, minus the natural logarithm of the above ground biomass at a first time point, divided by the number of days between those two time points ([log(TotalArea2)−log(TotalArea1)]/ndays). The time points are the same for all plants in one experiment. The first time point is chosen as the earliest measurement taken between 25 and 41 days after planting. If the number of measurements (plants) at that time point in that experiment is less than one third of the maximum number of measurements taken per time point for that experiment, then the next time point is taken (again with the same restriction on the number of measurements). The second time point is simply the next time point (with the same restriction on the number of measurements).

### Measuring the Greenness of Plants

[0432] The greenness index is calculated as one minus the number of pixels that are light green (bins 2-21 in the spectrum) divided by the total number of pixels, multiplied by 100(100*[1−(nLGpixels/npixels)]).

### Early Greenness:

[0433] The greenness index at the time point before the flowering time point (“GNbfFlow” or “Early GN”), when the maximum mean greenness for null plants is reached for that experiment. The flowering time point is defined as the time point where more than 3 plants with panicles are detected. The greenness before flowering (GNbfFlow) can be measured from digital images as well. It is an indication of the greenness of a plant before flowering. Proportion (expressed as %) of green and dark green pixels in the last imaging before flowering. It is both a development time related parameter and a biomass related parameter.

[0434] Time points are the same for all plants in an experiment. If the number of valid observations on that time point is 30 or less, the time point with the second highest mean greenness for null plants, before flowering, is chosen. The first time point is never chosen as flowering time point.

### Late Greenness:

[0435] The greenness index at the time point after or at the flowering time point (“Late GN”), when the minimum mean greenness for null plants is reached for that experiment. The flowering time point is defined as the time point where more than 3 plants with panicles are detected. Time points are the same for all plants in an experiment. If the number of valid observations on that time point is 30 or less, the time point with the second lowest mean greenness for null plants, after or at flowering, is chosen.

Greenness after Drought

[0436] The greenness of a plant after drought stress (“GNafDr”) can be measured as the proportion (expressed as %) of green and dark green pixels in the first imaging after the drought treatment.

### Seed-Related Parameter Measurements

[0437] The mature primary panicles were harvested, counted, bagged, barcode-labelled and then dried for three days in an oven at 37° C. The panicles were then threshed and all the seeds were collected and counted. The seeds are usually covered by a dry outer covering, the husk. The filled husks (herein also named filled florets) were separated from the empty ones using an air-blowing device. The empty husks were discarded and the remaining fraction was counted again. The filled husks were weighed on an analytical balance.

[0438] The total number of seeds was determined by counting the number of filled husks that remained after the separation step. The total seed weight was measured by weighing all filled husks harvested from a plant.

[0439] The total number of seeds (or florets) per plant was determined by counting the number of husks (whether filled or not) harvested from a plant.

[0440] Thousand Kernel Weight (TKW) is extrapolated from the number of seeds counted and their total weight.

[0441] The Harvest Index (HI) in the present invention is defined as the ratio between the total seed weight and the above ground area (mm²), multiplied by a factor 10⁶.

[0442] The number of flowers per panicle as defined in the present invention is the ratio between the total number of seeds over the number of mature primary panicles.

[0443] The “seed fill rate” or “seed filling rate” as defined in the present invention is the proportion (expressed as a %) of the number of filled seeds (i.e. florets containing seeds) over the total number of seeds (i.e. total number of florets). In other words, the seed filling rate is the percentage of florets that are filled with seed.

[0444] Also, the number of panicles in the first flush (“firstpan”) and the flowers per panicle, a calculated parameter (the number of florets of a plant/number of panicles in the first flush) estimating the average number of florets per panicle on a plant can be determined.

### Example 10

### Results of the Phenotypic Evaluation of the Transgenic Plants

[0445] The results of the evaluation of transgenic rice plants in the T1 generation and expressing a nucleic acid encoding the PAE1 polypeptide of SEQ ID NO: 2 under non-stress conditions are presented below in Table D. When grown under non-stress conditions, an increase of at least 5% as compared to control plants was observed in transgenic plants expressing a nucleic acid encoding the PAE1 polypeptide of SEQ ID NO: 2 for aboveground biomass (AreaMax), Emergence (early) vigour, root biomass (RootMax), and maximum height (HeightMax) and for seed yield (including total weight of seeds, number of seeds, fill rate, harvest index, the number of panicles in the first flush (FirstPan), number of filled seeds of a plant (nrfilledseed; counted by Quetzal) and the height (in mm) of the gravity centre of the leafy biomass, based on the absolute maximum (GravityYMax).

TABLE D
Data summary for transgenic rice plants; for each parameter,
the overall percent increase is shown for T1 generation
plants. For each parameter, the percentage overall is shown
if it reaches p < 0.05 and above the 5% threshold.

| | Overall |
|---|---|
| Parameter | Increase |
| AreaMax | 15.9 |
| EmerVigor | 14.4 |
| RootMax | 13.6 |
| totalwgseeds | 51.9 |
| nrtotalseed | 22.5 |
| fillrate | 27.1 |
| harvestindex | 43.2 |
| firstpan | 17.1 |
| nrfilledseed | 48.4 |
| HeightMax | 6.7 |
| GravityYMax | 9.3 |

### Example 11

### Sugarcane Phenotypic Evaluation Procedure

[0446] 11.1 The transgenic sugarcane plants generated are grown for 10 to 15 months, either in the greenhouse or the field. Standard conditions for growth of the plants are used.

[0447] 11.2 Sugar Extraction Method

[0448] Stalks of sugarcane plants which are 10 to 15 months old and have more than 10 internodes are harvested. After all of the leaves have been removed, the internodes of the stalk are numbered from top (=1) to bottom (for example=36). A stalk disc approximately 1-2 g in weight is excised from the middle of each internode. The stalk discs of 3 internodes are then combined to give one sample and frozen in liquid nitrogen.

[0449] For the sugar extraction, the stalk discs are first comminuted in a Waring blender (from Waring, New Hartford, Conn., USA). The sugars are extracted by shaking for one hour at 95° C. in 10 mM sodium phosphate buffer pH 7.0. Thereafter, the solids are removed by filtration through a 30 μm sieve. The resulting solution is subsequently employed for the sugar determination (see herein below).

[0450] 11.3 Fresh Weight and Biomass

[0451] The transgenic sugarcane plants expressing the PAE1 polypeptide are grown for 10 to 15 months. In each case a sugarcane stalk of the transgenic line and a wild-type sugarcane plant is defoliated, the stalk is divided into segments of 3 internodes, and these internode segments are frozen in liquid nitrogen in a sealed 50 ml plastic container. The fresh weight of the samples is determined. The extraction for the purposes of the sugar determination is done as described below.

[0452] The stem biomass is increased in the transgenic plant.

[0453] 11.4 Sugar Determination (Glucose, Fructose and Sucrose)

[0454] The glucose, fructose and sucrose contents in the extract obtained in accordance with the sugar extraction method described above is determined photometrically in an enzyme assay via the conversion of NAD+ (nicotinamide adenine dinucleotide) into NADH (reduced nicotinamide adenine dinucleotide). During the reduction, the aromatic character at the nicotinamide ring is lost, and the absorption spectrum thus changes. This change in the absorption spectrum can be detected photometrically. The glucose and fructose present in the extract is converted into glucose-6-phosphate and fructose-6-phosphate by means of the enzyme hexokinase and adenosin triphosphate (ATP). The glucose-6-phosphate is subsequently oxidized by the enzyme glucose-6-phosphate dehydrogenase to give 6-phosphogluconate. In this reaction, NAD+ is reduced to give NADH, and the amount of NADH formed is determined photometrically. The ratio between the NADH formed and the glucose present in the extract is 1:1, so that the glucose content can be calculated from the NADH content using the molar absorption coefficient of NADH (6.3 1 per mmol and per cm lightpath). Following the complete oxidation of glucose-6-phosphate, fructose-6-phosphate, which has likewise formed in the solution, is converted by the enzyme phosphoglucoisomerase to give glucose-6-phosphate which, in turn, is oxidized to give 6-phosphogluconate. Again, the ratio between fructose and the amount of NADH formed is 1:1. Thereafter, the sucrose present in the extract is cleaved by the enzyme sucrase (Megazyme) to give glucose and fructose. The glucose and fructose molecules liberated are then converted with the abovementioned enzymes in the NAD+-dependent reaction to give 6-phosphogluconate. The conversion of one sucrose molecule into 6-phosphogluconate results in two NADH molecules. The amount of NADH formed is likewise determined photometrically and used for calculating the sucrose content, using the molar absorption coefficient of NADH.

[0455] The sugarcane stalks are divided into segments of in each case three internodes, as specified above. The internodes are numbered from top to bottom (top=internode 1, bottom=internode 21). In the sugarcane wild-type plant, the sucrose contents rises from internode 1-3 up to internode 10-12. The sucrose contents of all subsequent internodes are similarly high.

The application's sequence listing, which the Patent Office published only in electronic form, follows.

SEQUENCE LISTING (469 sequences)

SEQ ID NO: 1 - DNA, 1002 bp, Oryza sativa
atgggttgttcttgggctcttgctgctctggttcttggcttcttggtggtggcagtccatggctctgagccgtggctgaatcagacgcaggtctactccaccaatgccaactctggtagcaatggcgtcttcgtcgggattacgctcatccagtcggcggccgccaagggagccgtatgcttggatgggagcttaccagggtatcacctacaccgagggtttggatcaggggcaaacagttggcttgtcaatttggagggtggaggctggtgcaacgatgttaaaagctgcgtgtttcgcaagagcagtcggcgtggttcatcaaatcacatggagagccaactccagtttactgggataatgagtaacaggcctgaagaaaatcctgatttctacaactggaacagagtgaaggttcgatattgtgatggcggatccttcactggtgatggggctgatgcgtctgcaggcctttatttccgaggtcagcgtatttggcaggctgctatggatgatctgatggcccaaggaatgagatatgctaaccaggcacttctttctggatgctctgctggtggtgtttcaaccatacttcactgtgacgagttccgtggattgtttagcggcagtacaaacgtgaagtgccttgctgatgctggaatgtttctggactttgttgatgtttctgggcaacgagaaatgagggacttcttcaatggtattgtgagattgcagggttccggaagaagcctgcctaggtcttgtacctcccgcatggataaaacttcgtgctttttcccccagaatgtggtgccaaacattcaaactccaacttttattttgaacactgcttatgatgtgtggcagcttcaacaaagtgtggcccccaaaagggctgatccgcaaggtctatggcgaggatgtaggatgaatcatgcctcctgtaatagcaaccaactgcaatttttacaaggtttcaggatcaaatgctcgatgcggtga

SEQ ID NO: 2 - protein, 333 aa, Oryza sativa
MGCSWALAALVLGFLVVAVHGSEPWLNQTQVYSTNANSGSNGVFVGITLIQSAAAKGAVCLDGSLPGYHLHRGFGSGANSWLVNLEGGGWCNDVKSCVFRKSSRRGSSNHMESQLQFTGIMSNRPEENPDFYNWNRVKVRYCDGGSFTGDGADASAGLYFRGQRIWQAAMDDLMAQGMRYANQALLSGCSAGGVSTILHCDEFRGLFSGSTNVKCLADAGMFLDFVDVSGQREMRDFFNGIVRLQGSGRSLPRSCTSRMDKTSCFFPQNVVPNIQTPTFILNTAYDVWQLQQSVAPKRADPQGLWRGCRMNHASCNSNQLQFLQGFRIKCSMR

SEQ ID NO: 3 - DNA, 1254 bp, Brassica rapa
atggtgaagcttttgttgttggtagggtttattgtagcttgctggctgatactaggaactcaagcaaatgagtatttagacttcaatgtaacagagatagaccgcattgaggaactggagtttggattctccaagtatagctccaatctgaaccctttattagttggtctcactcttatcagaggagctgactcaggagctgtttgtttggatggaacattgcctggataccacttgcaccgtggacatggatctggagctaacagttggctcattcaattagagggaggaggatggtgcaacaatgtcaggacatgtgtatacaggaagaagactagacgtgggtcatctaactacatggagaaagagcttcagtttacaggaatattgagtgataaagctcaagaaaatcctgacttctttaactggaatagagttaagcttcgttactgtgatggcgcttctttcagtggagatggtcagaatgaggctgcacagcttcagtttagaggagagcgtatctggagagcagccatagatgatttgaaggccaatggaatgagatacgctgaccaggcacttctctctggatgctcagctggtggtttagcagctatcttacgctgcgatgagttcagagacttgttccctggttccaccaaagtcaagtgcttaagtgacgcaggcttgttcttggacacagctgatgtgtctggtggacgaacaataaggaacttatacaatggtatagtagagtttcagagtgtgaagaacaacctgcctcgtatctgcacaaaccatctcgatccaacttcgtgtttcttcccagagaatctgatcagtcagatgaaaactccacttttcattgtcaacgcagcatatgatacatggcagatacaaagcagcatagctccaaaatcagctgatcctagtggcttttggcatgactgtagactcaaccatgaaaaatgcacctctggtcaaatgcggttcttgcaaagtttcagggatcagatgctgagagtagtcaagggcttctcaatgtctagacagaacggtttgttcataaactcctgctttgctcactgccaaaccgagaggcaagatacttggtttgcagatgattctcctgtcatcagtaaaaaggcagtggcaatagctgtgggagattggtattttgatagagcagaagtgaagttagttgattgtccttacccatgtgacaagagctgccacaacatggtgttcagatga

SEQ ID NO: 4 - protein, 417 aa, Brassica rapa
MVKLLLLVGFIVACWLILGTQANEYLDFNVTEIDRIEELEFGFSKYSSNLNPLLVGLTLIRGADSGAVCLDGTLPGYHLHRGHGSGANSWLIQLEGGGWCNNVRTCVYRKKTRRGSSNYMEKELQFTGILSDKAQENPDFFNWNRVKLRYCDGASFSGDGQNEAAQLQFRGERIWRAAIDDLKANGMRYADQALLSGCSAGGLAAILRCDEFRDLFPGSTKVKCLSDAGLFLDTADVSGGRTIRNLYNGIVEFQSVKNNLPRICTNHLDPTSCFFPENLISQMKTPLFIVNAAYDTWQIQSSIAPKSADPSGFWHDCRLNHEKCTSGQMRFLQSFRDQMLRVVKGFSMSRQNGLFINSCFAHCQTERQDTWFADDSPVISKKAVAIAVGDWYFDRAEVKLVDCPYPCDKSCHNMVFR

SEQ ID NO: 5 - DNA, 1242 bp, Brassica rapa
atgaatttgcgttttgcggcggtggtatgctgtctttggctgtgttctgtcgtgtgtgtggctcagagcggatctagcagtactgacgatgcgatctggtcgctggaaagtaaattgatggcgacatctaatgcttcacagcttctcatggtgcctctcactttgattcaaggagctgcctccaaaggagctgtgtgtctggatgggacactacctggttaccatctccaccgtggtttgggatcaggtgctaaccgctggctcatccaactcgagggaggaggatggtgcaacacgcggaggagctgtatcttcaggaaaaccacacgccgtggctcatcaaaccacatggagaaagtcttggccttcactggaatcttaagcaacaaagctaacgagaaccctgacttcttcaactggaacagagtcaaattgcgttactgtgatggcgcatctttcacaggcgatagtgaagaccagagttcacaactatactatagaggacaaagaatctggcaagtggctatggaagaactgctctctaaaggcatgcagaaagcagatcaggctctgctctctggatgttcagctggaggattagcttccatcctgcactgtgatcagttcaaggcagtcttacctggtactacgaaagtcaaatgcttaagtgatgctggaatgtttatggatgcagtggatgtctctggaggccactcgctgaggaacatgttccaaggtgttgttacagtacagaatctccaaaaggaactgtccactacttgtactaagcatttggatccaacttcgtgtttttttcctcagaacttggtttcagagatcaagactcccatgtttcttctaaatgcagcttacgacgcttggcaggtacaagagagcttagctcctccatctgctgacagaaccggctcttggaaagcatgcaaatcagatcactcccattgtaactcatctcaaatccacttcttccaagacttcaggagtcaaatggtgaatgctgtaaagactttctcggcctcggctcacaacggtctgttcataaactcatgcttcgcccactgccaatccgagagacaggacacttggtttgcaccagattctcctaagctttatggcaagacggtagctgaatctgttggtgattggtactttgacaggaaaacagtcaaggccattgactgtccttacccttgtgacaaaacatgtcacgatctcaccttctga

SEQ ID NO: 6 - protein, 413 aa, Brassica rapa
MNLRFAAVVCCLWLCSVVCVAQSGSSSTDDAIWSLESKLMATSNASQLLMVPLTLIQGAASKGAVCLDGTLPGYHLHRGLGSGANRWLIQLEGGGWCNTRRSCIFRKTTRRGSSNHMEKVLAFTGILSNKANENPDFFNWNRVKLRYCDGASFTGDSEDQSSQLYYRGQRIWQVAMEELLSKGMQKADQALLSGCSAGGLASILHCDQFKAVLPGTTKVKCLSDAGMFMDAVDVSGGHSLRNMFQGVVTVQNLQKELSTTCTKHLDPTSCFFPQNLVSEIKTPMFLLNAAYDAWQVQESLAPPSADRTGSWKACKSDHSHCNSSQIHFFQDFRSQMVNAVKTFSASAHNGLFINSCFAHCQSERQDTWFAPDSPKLYGKTVAESVGDWYFDRKTVKAIDCPYPCDKTCHDLTF

SEQ ID NO: 7 - DNA, 1248 bp, Brassica rapa
atgaggagcgtgtggctgtggattgcggtggctgtgtgctcactatgttcagccgcctcgatggtacggaggggatctagcgatggatttgagaaaccaagagagaataagatactggataacgagttgatggcgtctaaggtttcaatggtgcctctcaccttgattcatggtgctgactccaaaggagctgtgtgtctagatgggacgttacctggttatcatctagatcgtggttttggttcaggtgcgaacagttggcttatccatcttgagggtggaggatggtgtaacaatcaaagtagctgtgtgtttcgaaaaacaactcggcgtggctcctctaagttcatggagaaagctttgaattttactgggatattgagcaatacgcctcaagagaatcctgacttctttaagtggaacagaatcaagttgcggtactgtgatggtgcttctttctctggggatagtcaggacgagggttcacaaactttctatcgaggaaaacgaatctggcaagcggctatggaagagttcatgtctgtaggcatgcagaaagcagaacaggctctgctttctggttgttcagccggaggtttagcttcaatcttgcactgtgatgacttcagagaacgattacctctttctacgaaagtaaagtgcttaagtgatgctggaatgttcctggacgcagtggatgtctctgggggacgctctcttaggaacatgtaccaaggtgttgttacagtccagaacctccaaaaggacttgtccagtgcatgtacaaaccatttggatcctacttcgtgcttctttcctcagaacttggtttcagacatcaaaactcctatgtttcttctcaactcagcatatgactcctggcaggtcagacatagcttagctccttcacctgctgatccaagaggcgtctgggagcattgcaaatcagatatctcgcgttgtaattcatcacagctccaattcttacaagaattcaggaaacaaatggtgcttgccttaaactcattctcagcatctcctcagaacggtcttttcataaactcttgcttcacgcattgtcagtctgagatacaggacacttggtttactcaagactctcccaagctaaacggaaaaagagtggcagagtctgtaggtgactggtacttcgacagaaccaacaatgttaaagccattgactgtccttacccatgcgacaaaacatgtcaccacctgattttccaatga

SEQ ID NO: 8 - protein, 415 aa, Brassica rapa
MRSVWLWIAVAVCSLCSAASMVRRGSSDGFEKPRENKILDNELMASKVSMVPLTLIHGADSKGAVCLDGTLPGYHLDRGFGSGANSWLIHLEGGGWCNNQSSCVFRKTTRRGSSKFMEKALNFTGILSNTPQENPDFFKWNRIKLRYCDGASFSGDSQDEGSQTFYRGKRIWQAAMEEFMSVGMQKAEQALLSGCSAGGLASILHCDDFRERLPLSTKVKCLSDAGMFLDAVDVSGGRSLRNMYQGVVTVQNLQKDLSSACTNHLDPTSCFFPQNLVSDIKTPMFLLNSAYDSWQVRHSLAPSPADPRGVWEHCKSDISRCNSSQLQFLQEFRKQMVLALNSFSASPQNGLFINSCFTHCQSEIQDTWFTQDSPKLNGKRVAESVGDWYFDRTNNVKAIDCPYPCDKTCHHLIFQ

SEQ ID NO: 9 - DNA, 1254 bp, Brassica rapa
atgaggaaccttttcttgttaggggttgttgtggtaacaggactggttctagggactgaggcaaatgagtatctagagttcaatgtcactgaactagatcgcattgaggaattagagtatggtttctccaaatctagctccaacttcaacccattaatggttggcctcacacttatcagaggagctggtgccaaaggagctgtttgtttggatggaacattgcctggatatcacttacatcgtggacatggatctggagcaaatagctggctaattcaactagagggaggaggatggtgtgacaacataaggaactgtgtataccgaaagaagagtcgtcgtggttcctctaactacatggagaaacagattcagtttacaggaatacttagcgataaagctcaacaaaatccagattttttcaactggaatagagtcaagctccgttactgcgatggtggttcctttagtggtgatagtcagaacaaggctgcacggcttcagtttagaggagagcggatatggagagcagccatggacgatttgaaagcaaagggaatgcgatatgccaaacaggcacttctatccggatgctctgctggtggtttagcagtgatcttacgatgtgatgaattcagaaacttgtttccaggatctaccagaatcaagtgcttaagcgatgctggcttgttcttagacacacctgatgtgtccggtggccacaccatcaggaagctatataacggcgttgtgcagttgcagggagtgaggaacaatctgccgcatatgtgcacaaatcatctcaatccaacttcttgtttcttccctcaaaacttgatcagtcagatgaaaactcctctttttattgtcaatgcagcatatgatatttggcagattcaaagcagtatagctccaacaagtgcagaccctcatgggtattggcatgaatgcagattaaaccatggaagatgcaatgcagcacagctccggttcttgcaagggtttagaaatcaaatgttgagagccgtaacaggattctcaaagtcaagaaagaatggtttgtttataaactcatgttttgctcattgccaaaccgaaaggcaagacacttggttcgctgatgattctcctgttatccacaaaaaggcggtggcgatagcggttggagattggtattttgatagagcagaagtgaagctgatagattgtccgtacccgtgtgataggagctgccacaatcttgtcttcagatga

SEQ ID NO: 10 - protein, 417 aa, Brassica rapa
MRNLFLLGVVVVTGLVLGTEANEYLEFNVTELDRIEELEYGFSKSSSNFNPLMVGLTLIRGAGAKGAVCLDGTLPGYHLHRGHGSGANSWLIQLEGGGWCDNIRNCVYRKKSRRGSSNYMEKQIQFTGILSDKAQQNPDFFNWNRVKLRYCDGGSFSGDSQNKAARLQFRGERIWRAAMDDLKAKGMRYAKQALLSGCSAGGLAVILRCDEFRNLFPGSTRIKCLSDAGLFLDTPDVSGGHTIRKLYNGVVQLQGVRNNLPHMCTNHLNPTSCFFPQNLISQMKTPLFIVNAAYDIWQIQSSIAPTSADPHGYWHECRLNHGRCNAAQLRFLQGFRNQMLRAVTGFSKSRKNGLFINSCFAHCQTERQDTWFADDSPVIHKKAVAIAVGDWYFDRAEVKLIDCPYPCDRSCHNLVFR

SEQ ID NO: 11 - DNA, 1401 bp, Brassica rapa
atgacgaggagcgtgttgttgttgtcgttgttgttgtggattgtgtgctcgctatgctcagccgcggcctttgttcggagcggatctagcgacggagatactgagattgcgatatcgctgcttgagaagaaactgatggcgcctgaggtcgccatggtgcctctcaccttgatccaaggagctggctccaaaggagctgtgtgcttagatgggacgttacctggttatcatctggatcgtggttctggctctggtgctaacaattggcttatccagcttgagggtgggggatggtgtaacaaccataggacctgtgtctatcgcaaaaccagtcgacgtggctcctctaatttcatggaaaagaccttgcctttcactgggatcttgagcaataagcctctagagaatcctgacttctttaactggaacagggtcaagttgcggtactgtgatggtgcgtctttcgctggtgatagtcaggacgagagttcacaaattttctatagaggacaacggatttggcaagcggctatggaagagttcttgtctttaggcatgaagcaagcaaaccaggctctgctttctggatgctcagctgggggattagcttccatcttgcactgtgatgagttcagagagctgttgcctagttccactaaagtcaagtgcttaagtgatgctggaatgtttctagacgcagtggatgtctctgggggccactcgctcaggaatatgttccaaggtgttgttacagtgcagaacctccagaagggcttgtccagcacttgtacaaaccatttagatcctacctcgtgcttctttcctcagaacttggtttcagacatcaaaaccccaatgtttcttctcaacacagcatatgactcatggcagatccaagagagcttagctcctccaaccgctgacccaggcggcatctggaaggcatgcaaatcagatcactcgcaatgtaactcatcacagatccaattcttccaagacttcaggaaccaaatgatgtatgccgtaaattcattctcaaaatccgaccagaacggtcttttcataaactcttgcttcgcgcattgtcagaccgaaagacaggacacttggtttgcccaagattctccccaacttaacggaaagagagtggcagagactgtaggtgactggtacttcgaccgagccaaaaatatcaaagccatcgactgtgcttacccatgtgacaaaacatgtcacaatctgattttcgatgttaatcaaacaggtgtagatcggagtgttgatccaaaagctgcagagatctcttcttcttcttcttcaaggttttgttttcctcttcatagagcctctctggtctctctagtgttgacaacgatcatcctcgggttcttagctcagtag

SEQ ID NO: 12 - protein, 466 aa, Brassica rapa
MTRSVLLLSLLLWIVCSLCSAAAFVRSGSSDGDTEIAISLLEKKLMAPEVAMVPLTLIQGAGSKGAVCLDGTLPGYHLDRGSGSGANNWLIQLEGGGWCNNHRTCVYRKTSRRGSSNFMEKTLPFTGILSNKPLENPDFFNWNRVKLRYCDGASFAGDSQDESSQIFYRGQRIWQAAMEEFLSLGMKQANQALLSGCSAGGLASILHCDEFRELLPSSTKVKCLSDAGMFLDAVDVSGGHSLRNMFQGVVTVQNLQKGLSSTCTNHLDPTSCFFPQNLVSDIKTPMFLLNTAYDSWQIQESLAPPTADPGGIWKACKSDHSQCNSSQIQFFQDFRNQMMYAVNSFSKSDQNGLFINSCFAHCQTERQDTWFAQDSPQLNGKRVAETVGDWYFDRAKNIKAIDCAYPCDKTCHNLIFDVNQTGVDRSVDPKAAEISSSSSSRFCFPLHRASLVSLVLTTIILGFLAQ

SEQ ID NO: 13 - DNA, 1230 bp, Brassica rapa
atgaagaaacttttatggagtctgactctgtttggtgtcatcttaatcctccctgttaatggggagaagttcaaagattttaatgggacaaatgtgtatcagaccgaaaataatgtcaattccaaagcaaaggttacaatggttggactcactctcattaaaaatgctgctctgagatcagcagtgtgtctagatggaagtcctgccggttatcattttcatcccgggtctggttcaggagcaaagaattggctcgttcatttggagggaggcggatggtgtagtgacactgaaagttgtgaatacagcaaaagaactagtcacggatcgtccaagcatatggagaaaaagataccttttacaggaattctaagtgacaaagcctccgaaaatccagacttttataactggaacagagtaaaagttaggtactgtgacggtggatcctttatgggagacaatgaaaataaggatgcaaaacttcagtttagaggaaagcgaatatggacttctgttatgtcagatttgctgtcgaatggaatggaacatgcaaagcagggtctgctctctggatgttctgccggaggccttgcagcaatattccaatgtgaagactttaagagttcactcatgtcttccaccagggtaaaatgtctgagtgatgctggctttttcgttgatgccactgatgtctctggagatcgatctctgagacagttatacaccgacgtaatagaatttcagagtattacaaacaatctccctaatgactgtttaaatcgtcttaatccaacttcgtgttttttcccacaaaacctaataaaccaagtcaagactccattgtttattctaaatgctgcatacgattcttggcagatccaagagagtttaacttctaaatctgcagatccaactggaagttgggctgactgtacatttaacctcgccaagtgcaatgaatcccagatcatgttctttcaagagttcaggattcatatggtgaatttgctcggtggattcaaagagcagcgtaagaatggagtgtttcttaactcgtgcttttctcattgtcaaacagagagccatgacacatggtattccaaaaactctccttcggttaagaacaagaggattgcagttgctgtgggagattggtttttcgaaagaggaggagcaaaaatcatagactgtgcttatccttgtgacaagacttgccgcaatttaatttaa

SEQ ID NO: 14 - protein, 409 aa, Brassica rapa
MKKLLWSLTLFGVILILPVNGEKFKDFNGTNVYQTENNVNSKAKVTMVGLTLIKNAALRSAVCLDGSPAGYHFHPGSGSGAKNWLVHLEGGGWCSDTESCEYSKRTSHGSSKHMEKKIPFTGILSDKASENPDFYNWNRVKVRYCDGGSFMGDNENKDAKLQFRGKRIWTSVMSDLLSNGMEHAKQGLLSGCSAGGLAAIFQCEDFKSSLMSSTRVKCLSDAGFFVDATDVSGDRSLRQLYTDVIEFQSITNNLPNDCLNRLNPTSCFFPQNLINQVKTPLFILNAAYDSWQIQESLTSKSADPTGSWADCTFNLAKCNESQIMFFQEFRIHMVNLLGGFKEQRKNGVFLNSCFSHCQTESHDTWYSKNSPSVKNKRIAVAVGDWFFERGGAKIIDCAYPCDKTCRNLI

SEQ ID NO: 15 - DNA, 1245 bp, Brassica rapa
atgaacaagcttctgctgttggtaggctttgttgtagtgctaggaactactcaagcaaatgagtatttagatttcaatgtgacagagatagaccgcattgaggagctagagtttggattctccaagtacagctcaaatttgaaccctttattagttggtctcactctcatcagaggagctgattctggagctgtttgtttggatggaacattgcctggataccacttgcaccgtggacatggatccggagctaacagctggctaattcaattggagggaggaggatggtgcaacaacgtcaggacctgtgtatacaggaagaagactcgacgtggttcatctaactacatggagaagcagcttcagtttacaggaatactgagtgataaagctcaagagaatcctgacttctttaactggaatagagttaagcttcgttactgtgatggcgcttctttcagtggagatggtcagaatcaggctgcacagcttcagtttagaggagagcgtatcgggagagcagccatagctgatctgaaagccaaaggaatgcgatacgccaaccaggcacttctctctggatgttctgctggtggtttagcagcaattttacgctgtgatgagtttaggaacttgttccctggttccaccaaggtcaagtgcttgagtgatgctggcttgttcttggacacagctgatgtttctggtggccgcacaatcagaaacttatacaacggtgtagtaaattttcagagtgtgaagaacaacctgcctcgtatgtgcacaaaccatctagacccaacctcgtgtttcttcccacagaatctgatcagtcagatgaaaactccactttttattgtcaatgcagcatatgatacatggcagattcaaagcagcatagctccaacatcagctgaccctagaggcttttggcatgactgtagactaaaccatgcaaaatgcacaccttcacaaatccggttcttgcaaggattcagggatcagatgctgagagtagtgaagggcttctcaatgtctagacataatggtttgttcataaactcatgtttcgctcactgccaaaccgagaggcaggacacttggttcgctgatgattctcctgtcataagaaaaaaggctgtggctatagctgtgggagattggtattttgatagagcagaagtgaagttaattgattgtccttacccttgtgacaagagctgccacaacttggtgttcagatga

SEQ ID NO: 16 - protein, 414 aa, Brassica rapa
MNKLLLLVGFVVVLGTTQANEYLDFNVTEIDRIEELEFGFSKYSSNLNPLLVGLTLIRGADSGAVCLDGTLPGYHLHRGHGSGANSWLIQLEGGGWCNNVRTCVYRKKTRRGSSNYMEKQLQFTGILSDKAQENPDFFNWNRVKLRYCDGASFSGDGQNQAAQLQFRGERIGRAAIADLKAKGMRYANQALLSGCSAGGLAAILRCDEFRNLFPGSTKVKCLSDAGLFLDTADVSGGRTIRNLYNGVVNFQSVKNNLPRMCTNHLDPTSCFFPQNLISQMKTPLFIVNAAYDTWQIQSSIAPTSADPRGFWHDCRLNHAKCTPSQIRFLQGFRDQMLRVVKGFSMSRHNGLFINSCFAHCQTERQDTWFADDSPVIRKKAVAIAVGDWYFDRAEVKLIDCPYPCDKSCHNLVFR

SEQ ID NO: 17 - DNA, 1185 bp, Brassica rapa
atgtatgcgcttctgtggtgttggagtttcacaggactctttctcttgagcattcttgcaaatggggttatgggttatgatgaaatggacttgttcaatggaacatatgtgtttcacaaacaagatgatgatgatggagatgttctggtagtaggactcactctggtccaagccgcaactgctgaaggagcggtgtgtcttgacgggtcaatgcctggatatcatttgtatcgtgggtatggttcaggagctaacaactggatcattcagttgcagggtggtgcgtggtgtgacagcatagaagattgtcagaaccgtaaaaggagtagttatggatcgtctactttaatggagaaacagttaaattttacaggactactaagcaataaagccgctgaaaatccagacttttacaactggaataaagtaaaagtacggtattgtgatggcgcatccttcagcggtgatagcgaaaacaagacggcacaacttcagtttagaggaaagcgtatatttttagccgtcatggaagatttgatggcaaagggaatgtgtcatgcgaagcaggctttgctcaacggatgttcgtctgggggtctttcagcgattctacgctgcgatgatttcagtagtctgtttccttctaccaccaaagtaaaatgtatgagcgatgctggcttcttcctcgatgcggttgatatatctggagctcattctataaggcgtatgtattctggtgtcgtaaacacccagggtttacaaaacacgcttcctcgtacgtgcacaagccatcttgatccaacttcgtgccttttccctcaaaacataatcaaccaagtcaagacaccgctgtttattctcaactcggcatttgattcgtggcagattgagaatagtatagctccaccatctgctgatccgagtagcagttggcataactgcagctccagcttcaagtgcaacgcctctcagatgcaattcttggaaggtttcaagatgagcatgttagatgccctaaagaccttttcgatgtcgagcaagaacggaatgtatattagctcgcgctgggctcattgtctagctgagagaaaagatacttggtctcctggaaattctcaaccgggtgaagatacggggatggctgtagctgttggagattggtacttcgaaagagcaaaaaagtaa

SEQ ID NO: 18 - protein, 394 aa, Brassica rapa
MYALLWCWSFTGLFLLSILANGVMGYDEMDLFNGTYVFHKQDDDDGDVLVVGLTLVQAATAEGAVCLDGSMPGYHLYRGYGSGANNWIIQLQGGAWCDSIEDCQNRKRSSYGSSTLMEKQLNFTGLLSNKAAENPDFYNWNKVKVRYCDGASFSGDSENKTAQLQFRGKRIFLAVMEDLMAKGMCHAKQALLNGCSSGGLSAILRCDDFSSLFPSTTKVKCMSDAGFFLDAVDISGAHSIRRMYSGVVNTQGLQNTLPRTCTSHLDPTSCLFPQNIINQVKTPLFILNSAFDSWQIENSIAPPSADPSSSWHNCSSSFKCNASQMQFLEGFKMSMLDALKTFSMSSKNGMYISSRWAHCLAERKDTWSPGNSQPGEDTGMAVAVGDWYFERAKK

SEQ ID NO: 19 - DNA, 1251 bp, Brassica rapa
atgaggaagattttcttgttaggttttgtggtcacagtgctgattcttggcactgacgcaaatggatatctagagttcaatgtcacagagttagatcacattgaggaactagagtatggtgtctccaaatctatctccagtttcaacccattaatggttggcctcacacttatcactggagctggtgccaaaggagctgtttgtttggatggaacattgcctggatatcatttacaccgtggacatggatcaggagccaatagctggctaattcaactagagggaggaggatggtgtgacaacataaggaactgtgtataccgaaagaagagtcgtcgtggatcctctaactatatggagaaacagatacagtttacaggcatacttagcgataaagctcaagaaaatccagattttttcaactggaatagagtcaagcttcgttactgtgatggtggttccttcagtggagatagtcagaacaaggctgcagggcttcagtttagaggagagaggatatggagagcagcaatggatgatttggaaacaaagggaatgcaaaatgccaaacaggcacttctatctggatgctctgcaggtggtctagcagtgattttacgttgtgatgaattcagtaacttgttttcaagaaccaccaaagtcaaatgcttaagcgatgcaggcttgttcttggacacgcctgatgtgtctggtggccataccattaggaatctatataacggcgttgtgcagctgcagggagtgaggaacaatctaccacatatgtgcacagaccatctcaatccaacttcttgtttcttccctcaaaacttgatcagtgagatgaaaacccctctctttattgtcaatgcagcttatgatatttggcaggttcaaagcagtcttgctccaccaagtgcagatcctagtggttattggcatgaatgcagattaaaccatggaagatgcactccagcacagatactgttcttgcaagggtttagagatcagatgctgagggctgtgagcggattcttgaatgcaagaaagaacggtttgtttataaactcatgttttgctcattgccaaaccgaaaggcaagacacttggttcgctgatgattcgcctgttatcaacaagaaggcggtggcgacagcggttggagattggtattttgatagagcagaggtgaagctaatagattgtccatacccttgtgataggagctgccacaatcttgtcttcagatga

SEQ ID NO: 20 - protein, 416 aa, Brassica rapa
MRKIFLLGFVVTVLILGTDANGYLEFNVTELDHIEELEYGVSKSISSFNPLMVGLTLITGAGAKGAVCLDGTLPGYHLHRGHGSGANSWLIQLEGGGWCDNIRNCVYRKKSRRGSSNYMEKQIQFTGILSDKAQENPDFFNWNRVKLRYCDGGSFSGDSQNKAAGLQFRGERIWRAAMDDLETKGMQNAKQALLSGCSAGGLAVILRCDEFSNLFSRTTKVKCLSDAGLFLDTPDVSGGHTIRNLYNGVVQLQGVRNNLPHMCTDHLNPTSCFFPQNLISEMKTPLFIVNAAYDIWQVQSSLAPPSADPSGYWHECRLNHGRCTPAQILFLQGFRDQMLRAVSGFLNARKNGLFINSCFAHCQTERQDTWFADDSPVINKKAVATAVGDWYFDRAEVKLIDCPYPCDRSCHNLVFR

SEQ ID NO: 21 - DNA, 828 bp, Glycine max
atggagaatgcgagaataagccagtggttgatccttctggtgtgtgcgctgctgttgctgatatcagaagcttcttatgtgccaatcactattgttcagaacgcggtagcaaaaggagctgtttgtttggatgggagtccaccagcttatcattttgataggggatttggatcagggattaacaattggttggttgcatttgagggaggaggatggtgcaacaatgtcactacttgccttgctcgcaagaccaatcgtttaggttcatctaagcaaatggccaagctaattgccttttcaggaattttgaataacagggaaatgtttaatccagatttctacaactggaacagaatcaaggttaggtattgtgatggttcatcatttactggtgatgtggaagcagtgaatccagtgactaagttgcacttcagaggaggtaggattttcaatgctgtcatggaggatttactagcaaaaggaatgaaaaatgctcgaaatgctattatctcgggatgttcagctggaggattaacatcagtactgcattgtgatcgatttcgagctctattacctaggggagctagagtgaaatgcctctcagatgctggttactttatcaatggaaaggatgtcttgggagaacaacacattgaacagtacttcagtcaagttgttgccacacatggctctgctaggaatttgcctcaatcgtgcacttcaagacttagcccaaggctgtgctttttcccacaatatttggtgtcacgtatcactacaccaatcttctttgtaaacgcggcttacgactcatggcaggtcagttaa

SEQ ID NO: 22 - protein, 275 aa, Glycine max
MENARISQWLILLVCALLLLISEASYVPITIVQNAVAKGAVCLDGSPPAYHFDRGFGSGINNWLVAFEGGGWCNNVTTCLARKTNRLGSSKQMAKLIAFSGILNNREMFNPDFYNWNRIKVRYCDGSSFTGDVEAVNPVTKLHFRGGRIFNAVMEDLLAKGMKNARNAIISGCSAGGLTSVLHCDRFRALLPRGARVKCLSDAGYFINGKDVLGEQHIEQYFSQVVATHGSARNLPQSCTSRLSPRLCFFPQYLVSRITTPIFFVNAAYDSWQVS

SEQ ID NO: 23 - DNA, 1065 bp, Glycine max
atgctagtctgtttggatggaacggtgcctggataccatttggatcgtggatttggatctggtgcagatagttggcttattcatttggagggaggaggatggtgtaataccatcagaaactgtgtctatagaaaaaatactcgtcgtggatcctcaaaatacatggaaaatcaaataccattcacgggaatattgagcaacaaacctgaagaaaaccctgatttctttaactggaatagagttaaattacggtactgtgatggagcatctttcagtggagatagtgaagatgagtctgcacagctccagtttcgaggacaaaaaatatggctagctgcaatggaggaattaatgtccaaaggaatgcagaaagccgatcaggcacttctctctggatgctctgcgggtggtctggcatccataatacactgtgatgagttcgggagcttgtttggaaaatcttccaaagttaaatgtttgagcgatggaggtttttttcttgatgcaatggatgtatctgggggacgcacactgaggactcttttcggaggtgtggttcagttgcaggatgtacaaaaaaatctgccaaaaagttgtctcgaccaactagacccaacttcgtgcttctttcctcagaatatgatcgaacatgttgagaccccattgtttctactcaatgctgcttatgatgtgtggcaggtccaagccagtttagccccaccttcagctgaccgccttggttcttggaatgaatgcaaatcgaaccatgcaaattgtagctcatctcaaatgcagttccttcaagacttcagaaatcaaatgctgggtgacattaaagacttctcaagctcatctcaaactgggctattcataaattcttgttttgctcattgtcagtctgagagacaggagacatggtttgctgatgactctccccttatcgaggacaagccaattgcagttgctgttggagactggtattttgatcgagaagttgtcaaagctattgactgtgcttacccatgtgacaacagctgccataatctggtgtttaactttaagtga

SEQ ID NO: 24 - protein, 354 aa, Glycine max
MLVCLDGTVPGYHLDRGFGSGADSWLIHLEGGGWCNTIRNCVYRKNTRRGSSKYMENQIPFTGILSNKPEENPDFFNWNRVKLRYCDGASFSGDSEDESAQLQFRGQKIWLAAMEELMSKGMQKADQALLSGCSAGGLASIIHCDEFGSLFGKSSKVKCLSDGGFFLDAMDVSGGRTLRTLFGGVVQLQDVQKNLPKSCLDQLDPTSCFFPQNMIEHVETPLFLLNAAYDVWQVQASLAPPSADRLGSWNECKSNHANCSSSQMQFLQDFRNQMLGDIKDFSSSSQTGLFINSCFAHCQSERQETWFADDSPLIEDKPIAVAVGDWYFDREVVKAIDCAYPCDNSCHNLVFNFK

SEQ ID NO: 25 - DNA, 1059 bp, Glycine max
atgacaatgaagctggttttggtagttgttgttgaagttgcatgcttagtttctgggatcttgtcctttggatctgagacactctctgagctttctttcttagaaaatgatgtcgtctcaacaacaagaccttcctcttcatctcaacttcaacctcaacctcaacctcaacctcttatggtggacctcactctcattcatgaagctgattctaaaggagctgtctgtttggatggaacggtgcctggataccatttggatcgtggatttggatctggtgcagatagttggcttattcatttggagggaggaggatggtgtaataccatcagaaactgtgtctatagaaaaaatactcgtcgtggatcctcaaaatacatggaaaatcaaataccattcacgggaatattgagcaacaaacctgaagaaaaccctgatttctttaactggaatagagttaaattacggtactgtgatggagcatctttcagtggagatagtgaagatgagtctgcacagctccagtttcgaggacaaaaaatatggctagctgcaatggaggaattaatgtccaaaggaatgcagaaagccgatcaggcacttctctctggatgctctgcgggtggtctggcatccataatacactgtgatgagttcgggagcttgtttggaaaatcttccaaagttaaatgtttgagcgatggaggtttttttcttgatgcaatggatgtatctgggggacgcacactgaggactcttttcggaggtgtggttcagttgcaggatgtacaaaaaaatctgccaaaaagttgtctcgaccaactagacccaacttcgtgcttctttcctcagaatatgatcgaacatgttgagaccccattgtttctactcaatgctgcttatgatgtgtggcaggtccaagccagtttagccccaccttcagctgaccgccttggttcttggaatgaatgcaaatcgaaccatgcaaattgtagctcatctcaaatgcagttccttcaaggaatgtggtacacgtcggatgattggcgtaggacatga

SEQ ID NO: 26 - protein, 352 aa, Glycine max
MTMKLVLVVVVEVACLVSGILSFGSETLSELSFLENDVVSTTRPSSSSQLQPQPQPQPLMVDLTLIHEADSKGAVCLDGTVPGYHLDRGFGSGADSWLIHLEGGGWCNTIRNCVYRKNTRRGSSKYMENQIPFTGILSNKPEENPDFFNWNRVKLRYCDGASFSGDSEDESAQLQFRGQKIWLAAMEELMSKGMQKADQALLSGCSAGGLASIIHCDEFGSLFGKSSKVKCLSDGGFFLDAMDVSGGRTLRTLFGGVVQLQDVQKNLPKSCLDQLDPTSCFFPQNMIEHVETPLFLLNAAYDVWQVQASLAPPSADRLGSWNECKSNHANCSSSQMQFLQGMWYTSDDWRRT

SEQ ID NO: 27 - DNA, 1182 bp, Glycine max
atgagaatggggaacctcttctggcttggcattgttgcagcacttgttttcagcttctgggttgattccttttctgcctatgaatatcaccacttcaatgaaaccgagttctctttgttggagtctcaagaacaggtacattcatccctccttgggagaacttctctcatggttggactcacagttattcaaagtgctgctggcaaaggagcagtttgcttggatggaacattgcctgcttatcatttgcatcggggatatggatcaggagcaaacagctggatcgttaatttagagggaggtgggtggtgtaatgacgttagatcatgtgtttatcgcaagaaaacacggcgtgggtcatcaacattcatggaaaaacagataccttttactggaatattaagcaataatgttgaagataatccagattttttcaactggaacagagtgaaaattcgttattgtgacggtgcctcttttgctggggatggtgaagataaggctgcgcaactgcaatttagaggacagcgtatttggtcggcagcaatcgaagatttgatgtcaaagggaatgcgatttgccaggcaggctcttctttctggatgctcggctggtggtttggctactattatacactgtgatgaattcagaggttttttcccacagactacgaaagtgaagtgtcttagtgatgcaggattatttcttgatgcgattgatgtctccaggggacataccatcaggaattttttcagtggtgtcgtaaggctacagggagtgcaaaagaatctgccacacatttgtactagtcaccttgatcccacttcgtgcttcttccctcagaatttgattgctggtattagaaccccgctattcattcttaatactgcctatgactcatggcaggtccaatcaagcttagctccttcatcagcagatccccatggcttttggcatgattgcagattaaatcatgctaaatgtacttcttcacaaatccaatatttgcaaggattcaggaatcaaatgctgaatgctattaaaggcttctcaagatcacgtcagaatggattgttcataaattcatgttttgctcactgccaatctgagaggcaggatacatggtttgctgacaactctcctgtcattgggaacaaggtgggtctttcatcatgtctctaa

SEQ ID NO: 28 - protein, 393 aa, Glycine max
MRMGNLFWLGIVAALVFSFWVDSFSAYEYHHFNETEFSLLESQEQVHSSLLGRTSLMVGLTVIQSAAGKGAVCLDGTLPAYHLHRGYGSGANSWIVNLEGGGWCNDVRSCVYRKKTRRGSSTFMEKQIPFTGILSNNVEDNPDFFNWNRVKIRYCDGASFAGDGEDKAAQLQFRGQRIWSAAIEDLMSKGMRFARQALLSGCSAGGLATIIHCDEFRGFFPQTTKVKCLSDAGLFLDAIDVSRGHTIRNFFSGVVRLQGVQKNLPHICTSHLDPTSCFFPQNLIAGIRTPLFILNTAYDSWQVQSSLAPSSADPHGFWHDCRLNHAKCTSSQIQYLQGFRNQMLNAIKGFSRSRQNGLFINSCFAHCQSERQDTWFADNSPVIGNKVGLSSCL

SEQ ID NO: 29 - DNA, 1242 bp, Glycine max
atgtgccaaagaagcatgaagctgctgaggatgtttttgtttgtggggttggtgattgtgaaatgggtggaaggctttgaggatgctaatgtgacagaccttgacatgcaatatgtcagtggaagaggtttctacagacctttgatggttggttttactcttattaatggcgctgctgctaaaggagctgtttgcctggatggatctttaccggggtaccatttccaccgtggatatggttcaggatcaaacagttggctcatacaattggagggaggaggctggtgtggaactataaaaaattgtctttatagtaagaaaacacgtcatggttcatcattttttatggaaaaacaaataccatttattgggatattgagcaacaaagctgaggaaaatccagattttttcaattggaatagaataaaaatccgttattgcgacggtgcatcatttagtggggacagtcaaaatgcgggagcagggttatatttcagagggcaacgcatttggcaagctgctatggaagatttaatgtcaaaagggatgcgctatgccaaacaggctcttctatctggatgttctgctggaggtttagctactattatacattgtgatgaatttcgggaattgtttactagaaccacaagagtaaaatgcttaagtgatgctggattattccttgattccgttgatgtatctggtcgtcgcagcttaaggaatttgtttggaagtgtggtcaccttacagggagtgcaaaggagtcttccaaggagttgtaccagtcgcctcaatccaattttgtgctattttcctcagcacttaattgccggtgtcaggacaccattatttcttctcaatgcagcttatgatacttggcagattcaagccagtcttgctccaccatctgctgactaccattggaactggtatgaatgcagaaaaaattatgcacgttgcagtgcaccacagatacagtatcttcaaggttttcgaaatcagatgcttagatctacaagagccttctcacggtcttataaaaatgggttattcataaattcatgtttcgcccattgccaatcagaaagacaggatacatggtttgctcatgattcccctcgtattggaaatagggggatcgcggagtcggttgggaactggtattttggccgagttagtgtccaggctattggctgtccttacccttgtgacaaaacctgccataatttggtatttaagtga

SEQ ID NO: 30 - protein, 413 aa, Glycine max
MCQRSMKLLRMFLFVGLVIVKWVEGFEDANVTDLDMQYVSGRGFYRPLMVGFTLINGAAAKGAVCLDGSLPGYHFHRGYGSGSNSWLIQLEGGGWCGTIKNCLYSKKTRHGSSFFMEKQIPFIGILSNKAEENPDFFNWNRIKIRYCDGASFSGDSQNAGAGLYFRGQRIWQAAMEDLMSKGMRYAKQALLSGCSAGGLATIIHCDEFRELFTRTTRVKCLSDAGLFLDSVDVSGRRSLRNLFGSVVTLQGVQRSLPRSCTSRLNPILCYFPQHLIAGVRTPLFLLNAAYDTWQIQASLAPPSADYHWNWYECRKNYARCSAPQIQYLQGFRNQMLRSTRAFSRSYKNGLFINSCFAHCQSERQDTWFAHDSPRIGNRGIAESVGNWYFGRVSVQAIGCPYPCDKTCHNLVFK

SEQ ID NO: 31 - DNA, 1236 bp, Glycine max
atgagaatgaagaagctgattttaatactcatagcagcatttaccttcgtttctgtggctagatctgcgtctgatcatttcttcgaaaacgatggcgtttcactggcagttgctgcaacgcccggacctccacctctcatggtccccctcactcttattcagggagctgcttccaaaggagccgtctgtttggatggaacattgcctggttaccactttcatcctggatttggatctggggcaaatagttggctcattcaattggagggaggaggatggtgtaataccatcagaagttgtgtctttagaaaaactactcgtcgtggttcctcaaaatacatggaaaaacaactagcattcacagggatattgagcaataaagctgaagaaaaccctgatttctttaactggaacagagttatagtacgttactgtgatggggcatctttcagtggagatagtcaaaatgaggctgcacagcttcaattccgaggacaaaaaatatggcaagctgcaatgcaggaattattgttcaagggaatgcagaaggccaaccaggcccttttgtccggatgctctgcgggtggtctggcatctataatacattgtgatgagttccggagcttgtttcctacatctaccaaagtgaaatgtttgagtgatgcagggtttttcctagatgcggttgacatatctgggggtcacacactgaggaatctgtttggaggtgtagttaaattacaggaggtgcaaaaaaatctgccaaacagttgtctcaaccaactggacccaacttcgtgcttttttcctcagaatttgatcaaccatgttgaaactccattgtttctactcaatgcagcttatgatgcatggcaggtccaagaaagtttggccccacattcagcagatccccatggctcttggaatgattgtaaatcaaatcatgcacgctgtaactcatctcaaattcagttcctccaagacttcagaaatcaaatgctaaatgatgtgaaaggcttctcagggacatctcaaactgggttattcataaattcttgttttgctcattgccagtctgagagacaagatacatggtttgctgatgactctccactaattaacaacatgccaattgcaattgctgttggagactggttttttgatcggaaaactgtcaaagctatcgactgtgcttacccctgtgacaatacatgccataatctggtcttcaagtga

SEQ ID NO: 32 - protein, 411 aa, Glycine max
MRMKKLILILIAAFTFVSVARSASDHFFENDGVSLAVAATPGPPPLMVPLTLIQGAASKGAVCLDGTLPGYHFHPGFGSGANSWLIQLEGGGWCNTIRSCVFRKTTRRGSSKYMEKQLAFTGILSNKAEENPDFFNWNRVIVRYCDGASFSGDSQNEAAQLQFRGQKIWQAAMQELLFKGMQKANQALLSGCSAGGLASIIHCDEFRSLFPTSTKVKCLSDAGFFLDAVDISGGHTLRNLFGGVVKLQEVQKNLPNSCLNQLDPTSCFFPQNLINHVETPLFLLNAAYDAWQVQESLAPHSADPHGSWNDCKSNHARCNSSQIQFLQDFRNQMLNDVKGFSGTSQTGLFINSCFAHCQSERQDTWFADDSPLINNMPIAIAVGDWFFDRKTVKAIDCAYPCDNTCHNLVFK

SEQ ID NO: 33 - DNA, 1263 bp, Glycine max
atggagatggagagagttttgtgggttggcattgctataggacttgttttcagcaactgggtcgtaggatatgaacaatatcacttcaatgaaacagagttgtctttattagaggctcatgaagcttccttgtcctacgccgggaccgagagaaataatcttctgctggtaggactcacccttattcaaaatgctgctgctaaaggagcagtctgcttggatggaacattgcctggttatcattggcatcggggatatggatcaggagcaaatagctggcttattaatttagagggtggtggatggtgtaataatattagaacatgtgtttatcgcaagaaaacccggcgtggatcatcagatttcatggaaaaggagataccttttactggaatattaagtaataaggctgaagaaaatccagattttttcaattggaatagagtaaagcttcgttattgtgatggcgcctcatttactggggatagtgaagatgagactgcagaactgcaattcagaggacagcgtatttgggcagctgcaatggaagatttgatgtcaaaaggaatgcgttttgccaatcaggctcttctttcgggatgctctgcgggtggcctggctactattattcattgtgatgaatttcgtggtctctttccaaggaccaccaaagtgaaatgtcttagtgatgctgggttgtttcttgatgtgattgatgtatctggagggcatacccttaggaatttatacagtggtgttgtaggattgcagggagcacagaagaatctgccacaaatttgtactaatcaccttgatcccatctcgtgcttctttcctcaaaacttgattgccagtgttaagaccccgctattcattcttaatgctgcttatgattcatggcagatccagtccagtttagctcctccatcagcagatccccatggctattggcaacaatgtagattaaaccatgctaaatgtactggaccacaaattcaatttctgcaaggattcaggaatcatatgctgaatgctattaaatacttctcaagatcaaagcagaatggcttgtttattaattcttgtttttctcactgccaaactgagaggcaggatacatggtttgctgacaattctcctgttattaggaacaaggcaattgctctggctgttggagactggtatttcgatcgagcaggtgttaaggccattgattgtccttacccttgtgataatacatgccatcatctgattttcagatga

SEQ ID NO: 34 - protein, 420 aa, Glycine max
MEMERVLWVGIAIGLVFSNWVVGYEQYHFNETELSLLEAHEASLSYAGTERNNLLLVGLTLIQNAAAKGAVCLDGTLPGYHWHRGYGSGANSWLINLEGGGWCNNIRTCVYRKKTRRGSSDFMEKEIPFTGILSNKAEENPDFFNWNRVKLRYCDGASFTGDSEDETAELQFRGQRIWAAAMEDLMSKGMRFANQALLSGCSAGGLATIIHCDEFRGLFPRTTKVKCLSDAGLFLDVIDVSGGHTLRNLYSGVVGLQGAQKNLPQICTNHLDPISCFFPQNLIASVKTPLFILNAAYDSWQIQSSLAPPSADPHGYWQQCRLNHAKCTGPQIQFLQGFRNHMLNAIKYFSRSKQNGLFINSCFSHCQTERQDTWFADNSPVIRNKAIALAVGDWYFDRAGVKAIDCPYPCDNTCHHLIFR

SEQ ID NO: 35 - DNA, 1113 bp, Zea mays
atggcggcgtccggggcatggctggcccgtgcgacggcgacggcggtgctgggtttcgtcctggcggtggcgtcagctgaggcggcatcgggggacgtggagatggtgttcctcaaggccgcggtggccaaaggcgcagtgtgcttggacggcagcccaccggtgtaccatttctctcccggctccggttctggcgccaataactgggtcgtccacatggagggaggagggtggtgcaggaatcctgatgagtgtgctgtccgcaagggcaacttcaggggctcctccaaatttatgaagccactctcgttttcagggatattaggcggcaaccaaaaatccaatcctgatttctacaactggaatagagtaaagatcagatactgtgatggttcatcatttactggtgacgttgaggctgtggacactgcgaaagatctccgttacagagggttcagagtctggcgtgccgtcatcgatgatctacttactgtgaggggaatgagcaaggcgcaaaatgctcttctttctggatgctcagccggaggtctagcagcaatactacactgtgacagattccatgatctgtttccagcgaaaacaaaggtcaagtgtttttctgatgctggatattttttcgatgggaaggatatctccgggaacttttacgctaggtcaatctataagagcgttgtgaatctacatggatcagccaaaaatttaccagcttcatgtacctcaaagccaaagcaatcacctgagctgtgtatgttcccacagtatgttgtcccgacaatgcgcacaccattgttcatacttaatgcagcctacgattcgtggcaggtcaagaacgtcctagcacctagtccagctgatccgaagaagacttgggcccaatgcaagcttgacatcaagagctgctccgccagccaactcacaaccttgcaaaatttcaggacagattttctggcagcactccctaaaacgcagtctgtaggcatgttcatcgactcatgcaatgctcactgccaatcaggatctcaagacacgtggctagccgatggttctcccacggttaacaagacggtaagtctaatgctgcatcagttatga

SEQ ID NO: 36 - protein, 370 aa, Zea mays
MAASGAWLARATATAVLGFVLAVASAEAASGDVEMVFLKAAVAKGAVCLDGSPPVYHFSPGSGSGANNWVVHMEGGGWCRNPDECAVRKGNFRGSSKFMKPLSFSGILGGNQKSNPDFYNWNRVKIRYCDGSSFTGDVEAVDTAKDLRYRGFRVWRAVIDDLLTVRGMSKAQNALLSGCSAGGLAAILHCDRFHDLFPAKTKVKCFSDAGYFFDGKDISGNFYARSIYKSVVNLHGSAKNLPASCTSKPKQSPELCMFPQYVVPTMRTPLFILNAAYDSWQVKNVLAPSPADPKKTWAQCKLDIKSCSASQLTTLQNFRTDFLAALPKTQSVGMFIDSCNAHCQSGSQDTWLADGSPTVNKTVSLMLHQL

SEQ ID NO: 37 - DNA, 1266 bp, Zea mays
atggcggaccggccgtcgcttcctgctctcattattgctatcgccgttcttgctggcagttactgccgcgtggcgagctcggcctcgccggcggtggaagatgagctgcgcggtggaggaggagccggcggtccgacgacgatgcggcggcgcgcggcgtcggtgatggtgcccatcaccatcctcaagtccgctgttagcgacggagctgtgtgcatggatggaacgccacctgcttaccacttggatcctggctccggagcgggcagcagaagctggattgtgaacttagagggaggtgcgtggtgcaacagcgccaagacatgccggctcaccaggagctccggccgtggctcgtcggaccacatggacaaagagatccccttcaccggcatcatgagcagtagccgtgccgtgaatcctgatttctacaactggaaccgggtcaaggttcgctactgtgacggtggatcttttgccggcgaggccttcgacaaggacactgggatctacttccgagggcagcgcatctggaacgcggtcatccggcacctcctctccattgggatggccaacgctgaccaggtgctgctcgccggctgctcctcgggcggtctggcggtgatactgcactgcgaccagctccgcgccttcttcccgtccggctccaccgtcgtcaagtgcatctccgacggcggcctctacctcgacgccgtggacgtctccgggggccgcagcctgagatcctacttcggagacattgtggccatgcaaggaatagctcagaacctgccgccggcttgcaccgcccgcctcgacgccacctcgtgcttcttcccgcagaacataatcgacggcgttaaaaccccactgttcctgctaaatgccgcatacgacttcattcagattgtgctcagcctggcgccagacagagctgacccaagcggcgcttggcgagcctgcaagtccaaccgcacggcctgcagcgcatcccagatgagtttcctgcaagatttcagggaccagatggtagcgtccgtcaaaggcttctccggttccaggagcaacggggtcttcctaagctcctgcttcgcgcactgccagtccgagcagctgggcacctggaacaccaaaccaggtggctcccccaccattcaaaacaaggggatttcaaaatccgttggcgactggtactttgatcgagctgaggtgaaggcggtcgactgccgctatccctgcgacaacacttgccaccacattatatga

SEQ ID NO: 38 - protein, 421 aa, Zea mays
MADRPSLPALIIAIAVLAGSYCRVASSASPAVEDELRGGGGAGGPTTMRRRAASVMVPITILKSAVSDGAVCMDGTPPAYHLDPGSGAGSRSWIVNLEGGAWCNSAKTCRLTRSSGRGSSDHMDKEIPFTGIMSSSRAVNPDFYNWNRVKVRYCDGGSFAGEAFDKDTGIYFRGQRIWNAVIRHLLSIGMANADQVLLAGCSSGGLAVILHCDQLRAFFPSGSTVVKCISDGGLYLDAVDVSGGRSLRSYFGDIVAMQGIAQNLPPACTARLDATSCFFPQNIIDGVKTPLFLLNAAYDFIQIVLSLAPDRADPSGAWRACKSNRTACSASQMSFLQDFRDQMVASVKGFSGSRSNGVFLSSCFAHCQSEQLGTWNTKPGGSPTIQNKGISKSVGDWYFDRAEVKAVDCRYPCDNTCHHII

SEQ ID NO: 39 - DNA, 1248 bp, Medicago truncatula
atggtgaaccttttctgggtttgcattgtaatagcacttgttttcaccaactgggttgatgcaaatgcatattatcacatcaatgaaactgaactctctatcttagaagctcatgaagcttcttctttttcttcacttgtggctcagcctcacatggttggaataacccttattcaatctgctgctgctaaaggagctgtctgcttggatggaacattgcctgcttatcattttgatcacggatacggatccggtgcaaacagctggcttgttaatttagaggtggttggtgtaataaccgtagaacttgcgtctatcgcaagacaacacggcgtggatcatcaaaattcatggaaaaagcgataccttttacttggaatattaagcaataatgctcaagagaatccagatttttttaactggaacagagtgaaaattcgttactgtgatggtgcctcttttaccggggatagtgaagataaggctgcgcagttgcaattcagaggacagcgcatttggttggctgcagtggaggatttgatgtcaaaaggaatgcgttttgccaagcaggctcttctttctggatgctcagctggtggtcttgctactattttacactgcgatgaatttcgaggtcatttcccaaggactaccaaagtgaagtgcctcagtgatgctgggttatttcttaatgctgttgatgtagctggtgggcataccctcaggaattttttcaacggtgttgtcaccctacagggagcgcagaagaatcttccacgcgtttgtactaatcatcttgatcccacttcgtgcttctttcctgagaacttgattgccagtgtcagaaccccgctattcattcttaatactgcctatgactcgtggcagatccagtcaagcttagctccttcatcggccgatccccacggcaattggcgtgaatgcagattaaaccataataaatgttccggttcacaaatccaatttctgcaaggattcaggaatcacatggtgaatgttgtgagaggcttctcaagatcaagtcaaaatggattgttcataaattcatgctttgctcactgccaatctgagaggcaagacacatggtttgctgacaactctcctgtcataggaaacaaggcaattgctctggctgttggagactggtattttgaccgagccgcagttaaggacattgattgtccttacccttgtgataacacatgccaccatttggttttcagatga

SEQ ID NO: 40 - protein, 415 aa, Medicago truncatula
MVNLFWVCIVIALVFTNWVDANAYYHINETELSILEAHEASSFSSLVAQPHMVGITLIQSAAAKGAVCLDGTLPAYHFDHGYGSGANSWLVNLEVVGVITVELASIARQHGVDHQNSWKKRYLLLGILSNNAQENPDFFNWNRVKIRYCDGASFTGDSEDKAAQLQFRGQRIWLAAVEDLMSKGMRFAKQALLSGCSAGGLATILHCDEFRGHFPRTTKVKCLSDAGLFLNAVDVAGGHTLRNFFNGVVTLQGAQKNLPRVCTNHLDPTSCFFPENLIASVRTPLFILNTAYDSWQIQSSLAPSSADPHGNWRECRLNHNKCSGSQIQFLQGFRNHMVNVVRGFSRSSQNGLFINSCFAHCQSERQDTWFADNSPVIGNKAIALAVGDWYFDRAAVKDIDCPYPCDNTCHHLVFR

SEQ ID NO: 41 - DNA, 1236 bp, Medicago truncatula
atgaagctgctatttgtgtttggattcataggctttgtgattgtgaaaggtgtggatgtggaactgaaaggtttagagaatggtaatgtgacagacatgcaatatgtcagaggaagaggtttcaactatagacctttgatggttggtcttactcttattaatggagctgctgctaaaggagctgtctgccttgatggatctttaccggcttaccacttccatcgtggatacggttcaggttcaaacagttggctaatacatttggagggaggaggctggtgtggaactgtgagaaattgtatttacagtaagaaaacgcgacatggttcatcatattttatggaaaaacaaataccatttattggaatattgagcaacaaagctgcggaaaatccagattttttcaattggaatagagtaaaaattcgttattgtgatggcgcatcgtttagtggggacagtcaaaatgaggcagcaaggttgtatttccgagggcagcgcatatggcaagctgcaatggaagatttaatgtcgaaagggatgcgctatgccaaacaggctcttctatctggatgttctgcaggaggtttatcagctatactacattgcgatgaatttcgggaattgtttccaagaacaactagagtaaagtgctttagtgatgccggattattccttgactctgttgatgtatctggccgtcgcagtttaaggaatttgtttggcagtgtagtgactttacagggtgcgcataagagccttccaagaagttgtaccaatcacctcaatccaattttgtgctttttccctcagcatttaattgcaagtgtaaggacgccactatttcttctcaatgcagcttatgatacttggcagattcaagccagtctagctccaccatctgctgactaccattggaattggtatgactgccgaaaaaattatgcacgctgtagttcaccacagatacaatatctacaaggttttcgaaatcagatgcttagagttacaagacgcttctcaaggtcccgccaaaacgggttattcattaattcgtgttttgctcactgccaatctgaaagacaggatacatggcatgcacgcggttctcctcatattggaaataaagggatcgcagattctgtcgggaactggttttttgaccgagttggtgtccaagctattgggtgtccttacccttgtgacaaaacatgccataatttggttttcaactga

SEQ ID NO: 42 - protein, 411 aa, Medicago truncatula
MKLLFVFGFIGFVIVKGVDVELKGLENGNVTDMQYVRGRGFNYRPLMVGLTLINGAAAKGAVCLDGSLPAYHFHRGYGSGSNSWLIHLEGGGWCGTVRNCIYSKKTRHGSSYFMEKQIPFIGILSNKAAENPDFFNWNRVKIRYCDGASFSGDSQNEAARLYFRGQRIWQAAMEDLMSKGMRYAKQALLSGCSAGGLSAILHCDEFRELFPRTTRVKCFSDAGLFLDSVDVSGRRSLRNLFGSVVTLQGAHKSLPRSCTNHLNPILCFFPQHLIASVRTPLFLLNAAYDTWQIQASLAPPSADYHWNWYDCRKNYARCSSPQIQYLQGFRNQMLRVTRRFSRSRQNGLFINSCFAHCQSERQDTWHARGSPHIGNKGIADSVGNWFFDRVGVQAIGCPYPCDKTCHNLVFN

SEQ ID NO: 43 - DNA, 1134 bp, Oryza sativa
atggcgaatgggggtgtctgcctctcgtgctctgcacttgtctgcgcgctggtgtttctcacggtggatggtgatttcgtggacattacttacgtagcgagcgctgtggccaaaggcgcagtctgtttggatgggagccccccggcctaccatctcgcccggggttttggctccggcgtgaatagttggctggttcatttcgagggaggaggatggtgcagcaatgtgacgacctgcctgcaacgcaaacgcactcggttaggatcatcgaagcagatggcaaagcagattgccttctctggaatactgagcaacacccctgattacaacccggatttctacaattggaacaaggtcaaggttcggtactgtgatgggtcatctttcaccggcgatgtggaaaaagtagatcctgcaacaaagcttcactacagaggtgctagggtgtggcaagcagttatggatgatctgcttgcgaaaggaatgaacagtgccaataatgctctaatttcgggctgttctgctggtggtttaacttccatactacactgtgacagatttcgtgaccttttcccagtggataccaaagttaaatgcctttctgatgctggtttcttcatcaatgagaaggatattgctggagtggagtacattgtggcctttttcaatggcgtagctacaacccatggatcagcgaagaatttaccttctgcttgcacctccagattgtccccaggcatgtgcttttttcctcagaatgaggtgaaacagattcagacacctttgttcattctcaacgcagcgtatgattcctggcaggtaaggaacatcttggtgccaggatttgcagaccctcatggtaaatggcatagctgtaagcatgatatagatcaatgtcctgcatcgcaacttcaaatcttgcaaggattcagagacgattttctgaaagcactgaaggaacaagggactccctccaccagaggattgtttataaactcatgcttcgtgcattgccaatctgagacgcaggagacatggtttgcatctggttcccccatgcttgaaaccaaagtaatactacatccttcaacttcaacaccacttaactcaaaattaaaccaaagttactactag

SEQ ID NO: 44 - protein, 377 aa, Oryza sativa
MANGGVCLSCSALVCALVFLTVDGDFVDITYVASAVAKGAVCLDGSPPAYHLARGFGSGVNSWLVHFEGGGWCSNVTTCLQRKRTRLGSSKQMAKQIAFSGILSNTPDYNPDFYNWNKVKVRYCDGSSFTGDVEKVDPATKLHYRGARVWQAVMDDLLAKGMNSANNALISGCSAGGLTSILHCDRFRDLFPVDTKVKCLSDAGFFINEKDIAGVEYIVAFFNGVATTHGSAKNLPSACTSRLSPGMCFFPQNEVKQIQTPLFILNAAYDSWQVRNILVPGFADPHGKWHSCKHDIDQCPASQLQILQGFRDDFLKALKEQGTPSTRGLFINSCFVHCQSETQETWFASGSPMLETKVILHPSTSTPLNSKLNQSYY

SEQ ID NO: 45 - DNA, 1287 bp, Linum usitatissimum
atggagtcaaagcagcagcagctcttactgctgctttgcctcttcttttctttaaccatttccattgtttctgctgatgtcacccccggatctgattccctcacttacgacatctcctccttagccaccacctccgccgtcaccaccgccgccgccgctttactcagctcagctcagccccaacctgtaatggttcccctctctctcatccctggagctgattccaaaggagctgtctgtttggatgggtcacttcctggttaccatttccaccgtggctctggaaccggtgccaaccgttggctcattcagttggagggtggcggatggtgcaactcgcttaggacttgtctttataggagaggttctcgacatggttcatcgaaattcatggagaagtttatacctttcactggtatactgagtgataaagcagaatacaatcctgatttctataactggaataggatcaagcttcgttattgcgatggggcttctttcaccggtgatagccagaataaggctgcgaaactgtactacagagggcaacgtatctggtctgcagccatggaacacttcatgacccttggaatgaagtctgcaaaccaggttcttctttctggttgctccgcgggtggtctggcatcgataatacactgtgatgagtttggggccttgtttcctagatctaccaaagtcaaatgcttgagtgacgccggaatgtttcttgatgcaaaggatgtttctggtgggcgcaccatgaggaacttctacagtggagtgattaacattctgcaaccgcagaaggacctaccatcttcttgcaccaaccacctggattcgacttcgtgcttctttcctcagaatttgatcggcaacataaagacaccaatgttcgtgctgaatgcagcctatgatgcatggcagattcaagctagtttagctccacgagctgctgatccgcaaggccattggactgcctgcaaaaataaccatgcagcttgtaactcatcacagatcaacttctttcaagacttcaggatccaaatgctgaaagcagtgacaaggttcgccatgtcgaaaccgaacgggctgttcataaactcttgttttgcgcactgccagtctgaaagacaagacacttggtttgcggatgattctccagtcttacattcaaagacgatagcgcaatcagtaggagactggtacttcgatcgagcggcagtgaaagctattgactgcccgtatccatgtgacaacagctgccataatctaaggttcaactga

SEQ ID NO: 46 - protein, 428 aa, Linum usitatissimum
MESKQQQLLLLLCLFFSLTISIVSADVTPGSDSLTYDISSLATTSAVTTAAAALLSSAQPQPVMVPLSLIPGADSKGAVCLDGSLPGYHFHRGSGTGANRWLIQLEGGGWCNSLRTCLYRRGSRHGSSKFMEKFIPFTGILSDKAEYNPDFYNWNRIKLRYCDGASFTGDSQNKAAKLYYRGQRIWSAAMEHFMTLGMKSANQVLLSGCSAGGLASIIHCDEFGALFPRSTKVKCLSDAGMFLDAKDVSGGRTMRNFYSGVINILQPQKDLPSSCTNHLDSTSCFFPQNLIGNIKTPMFVLNAAYDAWQIQASLAPRAADPQGHWTACKNNHAACNSSQINFFQDFRIQMLKAVTRFAMSKPNGLFINSCFAHCQSERQDTWFADDSPVLHSKTIAQSVGDWYFDRAAVKAIDCPYPCDNSCHNLRFN

SEQ ID NO: 47 - DNA, 1269 bp, Linum usitatissimum
atggagtcgaagaaccagctgctatacctccgttacttcagcattgctatcattttctcggcaactaccactacctccgccgccgccagatctgattccgccgccgccgtccaggcatttctcgaaacttccgccgccgccgcttcatcgtcagctctatccaaacctctcatggttccgctcactctcattcaaggagccgattccaaaggagctgtttgtttagatgggacgctgcctggctaccatatccatagagggtctggaattggtgcaaacagttggctcattcagttggagggaggtggatggtgcaactctgtgaagaattgtatatacaggaaaactacacggcgtggttcgtccaaatacatggagaaggttataccattcactggaatcttgagtgaaaaacctgaagaaaaccctgatttcttcaactggaataggatcaagttacgttactgcgatggtgcgtctttcaatggcgatagccagaacgaggctgcacagctctactttcgaggacaacgaatctggtccgaagccatggaacattttatgtccctcggaatgaagtcagcaaaccaggctcttctatctggttgctctgctggagggctggcatcaattttgcactgtgatgagttcagtgccatgttcactcaatccaccaaagtcaaatgcttaagtgatgccggcatgttcctaaatgcaaaggatgtatctgggggaaacaccctccaagcattctataatggagttgttagcacacagcaactgcagagggacctaccaagttcttgcaccaaccatttggatcctacttcttgcttcttcccccaaaatttggttgacaacgtccagacccccatgtttttactcaatgcagcctacgatgcatggcagattcaagctagtttagctccaccatcagcggatcctaatgggcagtgggatggctgcaaaaagaaccatttacagtgtaactcaacacagatcaacttctttcaagatttcaggaaccaaatgctgaatgcagtgaagggtttctccaactcccaacggaacgggttgttcataaattcgtgctttgcgcattgccaaaccgaaaagcaggatacatggtttgctgatgattctcctgtattgaacaagaagacggttgcacaatcagtgggagactggtacttcgatcgagttgccgtcaaggctatcgactgtccgtatccctgcgacaactcctgccataatctagtattcaagtga

SEQ ID NO: 48 - protein, 422 aa, Linum usitatissimum
MESKNQLLYLRYFSIAIIFSATTTTSAAARSDSAAAVQAFLETSAAAASSSALSKPLMVPLTLIQGADSKGAVCLDGTLPGYHIHRGSGIGANSWLIQLEGGGWCNSVKNCIYRKTTRRGSSKYMEKVIPFTGILSEKPEENPDFFNWNRIKLRYCDGASFNGDSQNEAAQLYFRGQRIWSEAMEHFMSLGMKSANQALLSGCSAGGLASILHCDEFSAMFTQSTKVKCLSDAGMFLNAKDVSGGNTLQAFYNGVVSTQQLQRDLPSSCTNHLDPTSCFFPQNLVDNVQTPMFLLNAAYDAWQIQASLAPPSADPNGQWDGCKKNHLQCNSTQINFFQDFRNQMLNAVKGFSNSQRNGLFINSCFAHCQTEKQDTWFADDSPVLNKKTVAQSVGDWYFDRVAVKAIDCPYPCDNSCHNLVFK

SEQ ID NO: 49 - DNA, 1227 bp, Linum usitatissimum
atggagtcgaagaaccacctgctatgcctccgttacttcaccattgctatcattttctcggcagctaccaccaccaccagatctgattccaccgccgccgattcaccgtcagctctatccaaacctctcatggttcccctcactctgattcaaggagctgattccaaaggagctgtttgtttagatgggacgctgcccggctaccatatccatagagggtctggaattggtgcaaacagttggctcattcagttggagggaggtggatggtgcaactctgtgaagaattgtatatacaggaaaactacacggcgtggttcctccaaatacatggagaaggttataccattcactggaatcttgagtgaaaaacctgaagaaaaccctgatttcttcaactggaacaggatcaagttacgttactgtgatggtgcgtctttcaatggcgatagccagaacgaggctgcacagctctactttcgaggacaacgaatctggtccgtagccatggaacagtttatgtccctcggaatgaagtctgcaaaccaggctcttctatctggttgctctgctggagggctggcatcaattttgcactgtgatgagttcagtgccatgttcactcaatccaccaaagtcaaatgcttaagcgatgccggcatgttcctaaacgcaaaggatgtatctgggggaaacaccctccaagcattctataatggagttgttagcacacagcaactgcagagggacctgccaagttcttgcaccaaccatctggatcctacttcttgcttcttcccccaaaatttggttgacaacatccagacccccatgtttttactcaatgcagcctacgatgcatggcagattcaagctagtttagctccaccatcagcggatcctaatggccagtgggatggctgcaaaaagaaccatttacagtgtaactcaacacagatcaacttctttcaagatttcaggaaccaaatgctgaatgcagtgaagggtttctccaactcccaacggaacgggctgttcataaattcgtgctttgcacattgccaaaccgaaaggcaggatacatggtttgctgatgattctcctgtattgaacaagaagacggttgcacaatcagtgggagactggtacttcgatcgagttggcgtcagggctatcgactgtccgtatccctgcgacaactcctgccataatctagtattcaagtga

SEQ ID NO: 50 - protein, 408 aa, Linum usitatissimum
MESKNHLLCLRYFTIAIIFSAATTTTRSDSTAADSPSALSKPLMVPLTLIQGADSKGAVCLDGTLPGYHIHRGSGIGANSWLIQLEGGGWCNSVKNCIYRKTTRRGSSKYMEKVIPFTGILSEKPEENPDFFNWNRIKLRYCDGASFNGDSQNEAAQLYFRGQRIWSVAMEQFMSLGMKSANQALLSGCSAGGLASILHCDEFSAMFTQSTKVKCLSDAGMFLNAKDVSGGNTLQAFYNGVVSTQQLQRDLPSSCTNHLDPTSCFFPQNLVDNIQTPMFLLNAAYDAWQIQASLAPPSADPNGQWDGCKKNHLQCNSTQINFFQDFRNQMLNAVKGFSNSQRNGLFINSCFAHCQTERQDTWFADDSPVLNKKTVAQSVGDWYFDRVGVRAIDCPYPCDNSCHNLVFK

SEQ ID NO: 51 - DNA, 1176 bp, Populus trichocarpa
atgtgcagaatggtagattcaagattaggccactggttaaaactcctggtttctctgatgttattgctgaaaacacaagggctttatgtaggaattacttacgtaaagagtgcagtggccaaaggagctgtttgtttggatggaagcccgccggcttaccactgggataaagggtttggtacaggcattaatagttggttgatacattttgagggaggaggatggtgcaacaatgtcacgagctgcctttcccgtaagaaaactcatttaggttcatcgaagctaatgggacagcaaattgctttctctgggattatgaacaacaagcggccgtttaatccagatttttacaattggaatagagttaagatcagatactgtgatgggtcatcgtttaccggtgatgtgcaggcagtcaatcctgctactaatcttcacttcagaggagctaggatttggcttgctgtcattgaggatctattaccaaaaggattgaaaaatgctgaaaacgctcttctttctggctgttcagctggtggattggcttccattttgcattgcgacagtttccgtgcactcctacgtatgggcactaaagtaaaatgcctttcagatgctggttattttatcaaagtgaaggatgtctccggagccccgcatgtgcagacctactttaatgaaattgtgacattacatggatctgcaaaaaatctgcccctgtcctgcacttcagtgctgaaaccctcattctgtttcttcccacaatatgtggctccacaagtacgaacgccacttttcattcttaatgcagcctacgattcatggcagataagaaacattttggcaccgagtattgctgatccccttggcgtctggaagagctgcaagctagacataaacaactgctcacctcttcaactcaaatctatgcaagattttaggttgcagtttctgaatgcattgaataaatcaaccaactcttcatctagaggattgtatatagactcttgctatgcccactgccaaactgaaacacaagagaaatggttcatggaagactccccagtgcttggtaaaaaggtaagagactgcaagttttctcctcattatcaatcctctcctattgtgtatacatcagtaatatttttgctgcagctcattcttcttttaagctag

SEQ ID NO: 52 - protein, 391 aa, Populus trichocarpa
MCRMVDSRLGHWLKLLVSLMLLLKTQGLYVGITYVKSAVAKGAVCLDGSPPAYHWDKGFGTGINSWLIHFEGGGWCNNVTSCLSRKKTHLGSSKLMGQQIAFSGIMNNKRPFNPDFYNWNRVKIRYCDGSSFTGDVQAVNPATNLHFRGARIWLAVIEDLLPKGLKNAENALLSGCSAGGLASILHCDSFRALLRMGTKVKCLSDAGYFIKVKDVSGAPHVQTYFNEIVTLHGSAKNLPLSCTSVLKPSFCFFPQYVAPQVRTPLFILNAAYDSWQIRNILAPSIADPLGVWKSCKLDINNCSPLQLKSMQDFRLQFLNALNKSTNSSSRGLYIDSCYAHCQTETQEKWFMEDSPVLGKKVRDCKFSPHYQSSPIVYTSVIFLLQLILLLS

SEQ ID NO: 53 - DNA, 978 bp, Populus trichocarpa
atgtgcagaatggtagattcaagattaggccactggttaaaactcctggtttctctgatgttattgctgaaaacacaagggctttatgtaggaattacttacgtaaagagtgcagtggccaaaggagctgtttgtttggatggaagcccgccggcttaccactgggataaagggtttggtacaggcattaatagttggttgatacattttgagggaggaggatggtgcaacaatgtcacgagctgcctttcccgtaagaaaactcatttaggttcatcgaagctaatgggacagcaaattgctttctctgggattatgaacaacaagcggccgtttaatccagatttttacaattggaatagagttaagatcagatactgtgatgggtcatcgtttaccggtgatgtgcaggcagtcaatcctgctactaatcttcacttcagaggagctaggatttggcttgctgtcattgaggatctattaccaaaaggattgaaaaatgctgaaaacgctcttctttctggctgttcagctggtggattggcttccattttgcattgcgacagtttccgtgcactcctacgtatgggcactaaagtaaaatgcctttcagatgctggttattttatcaaagtgaaggatgtctccggagccccgcatgtgcagacctactttaatgaaattgtgacattacatggatctgcaaaaaatctgcccctgtcctgcacttcagtgctgaaaccctcattctgtttcttcccacaatatgtggctccacaagtacgaacgccacttttcattcttaatgcagcctacgattcatggcagataagaaacattttggcaccgagtattgctgatccccttggcgtctggaagagctgcaagctagacataaacaactgctcacctcttcaactcaaatctatgcaaggtgactggaagcaacttaatttagacactcaagcaatcctatga

SEQ ID NO: 54 - protein, 325 aa, Populus trichocarpa
MCRMVDSRLGHWLKLLVSLMLLLKTQGLYVGITYVKSAVAKGAVCLDGSPPAYHWDKGFGTGINSWLIHFEGGGWCNNVTSCLSRKKTHLGSSKLMGQQIAFSGIMNNKRPFNPDFYNWNRVKIRYCDGSSFTGDVQAVNPATNLHFRGARIWLAVIEDLLPKGLKNAENALLSGCSAGGLASILHCDSFRALLRMGTKVKCLSDAGYFIKVKDVSGAPHVQTYFNEIVTLHGSAKNLPLSCTSVLKPSFCFFPQYVAPQVRTPLFILNAAYDSWQIRNILAPSIADPLGVWKSCKLDINNCSPLQLKSMQGDWKQLNLDTQAIL

SEQ ID NO: 55 - DNA, 1260 bp, Populus trichocarpa
atgaagtttttcagcttctgggctgcggctgttgctgtttgtctttttggggtatgggtggtggatgggttcttggagatgaatgaagaagagatattttacactgaagctaatgcttcttattacattgaatctaaagcttataatcccaataatgctttgttggttggccttactcttatcaaatcagctgctgctaaaggagcagtctgtttggatggaacattgcctggataccattggcatcgcgggtatggttcaggagcaaatagttggcttattcaattggagggaggaggatggtgtaattctgttagagcttgtgtttaccgaaaaacaactcggcgaggctcatctaactatatggaaaagcagttggcattcactggaatactgagcaataaagctgtagaaaatcctgattttttcaactggaacagagtaaaacttcgatactgtgatggtgcctcttttacgggggacagtgaacacaaggctgcacaacttcaatttagaggacaacgtatatggtcagctgcaatggaagatttaatgtctaaggggatgcgctatgccaatcaggctcttctttctggctgctctgctgggggtctagcttccattttacactgtgatgagtttaggaacttctttccgagaaaaactagagtgaaatgcctgagtgatgctggtttattccttgatgcagttgatgtttctggtgggcgaacgttaagaaacttatatggtggtgttgtgggcttgcagggggtgcagaataaccttccacgcatatgcatcaaccaccttgatccaacttcgtgcttcttccctcaaaacgtaattggcaatgttaaaaccccactgttcattctcaacgcagcttatgattcatggcagatccagtccagcttagccccaccatctgcagatcctgctggctattggagtaattgcagaaaggaccactcaaaatgttctgcatcccaaatccagtttttgcaaggattcagaaatcaaatgttgaatgcgataaaaggcttttcaaggtctagacagaatggcttgtttataaattcatgttttgctcattgccaatcagagaggcaagatacatggtttgccgataattcccccgtacttgggaacaagccaattgcacttgctgttggagattggtatttcgaccggtcgggcgagaaggctattgactgcccctacccctgtgacagcagttgccacaatctggttttcagatga

SEQ ID NO: 56 - protein, 419 aa, Populus trichocarpa
MKFFSFWAAAVAVCLFGVWVVDGFLEMNEEEIFYTEANASYYIESKAYNPNNALLVGLTLIKSAAAKGAVCLDGTLPGYHWHRGYGSGANSWLIQLEGGGWCNSVRACVYRKTTRRGSSNYMEKQLAFTGILSNKAVENPDFFNWNRVKLRYCDGASFTGDSEHKAAQLQFRGQRIWSAAMEDLMSKGMRYANQALLSGCSAGGLASILHCDEFRNFFPRKTRVKCLSDAGLFLDAVDVSGGRTLRNLYGGVVGLQGVQNNLPRICINHLDPTSCFFPQNVIGNVKTPLFILNAAYDSWQIQSSLAPPSADPAGYWSNCRKDHSKCSASQIQFLQGFRNQMLNAIKGFSRSRQNGLFINSCFAHCQSERQDTWFADNSPVLGNKPIALAVGDWYFDRSGEKAIDCPYPCDSSCHNLVFR

SEQ ID NO: 57 - DNA, 1314 bp, Populus trichocarpa
atgatgacgttgtacttgtggttgggatttatgtatgggttaatgatgtgctctttaacatggaaatgtgtaaactgttttgaattcgaacactctcagcctctgcctctccaagattggaataataatgtcacttataaagcagcagcagaagcatttgcatatgcatatgctcgtcgcacaccaccgttaatggtgggtcttacacttgttaatgcagctgcttcaaagggagctgtctgcctggacggctcattaccagggtaccacatccacagaggatatggatcaggcgcaaacagttggctcgttcaattggagggcggaggatggtgtaattcaatcagaaaatgtgtttttagtaagaaaacacgccatggttcttcacattatatggaaaagcagataccttttgaaggcatactcagcaacaaagctgaagaaaatcctgatttttataattggaacagggtcaaggttcgttattgtgatggtggatctttcagtggagacagtcaaaatgaggcagcacaactctattttagaggacaaagaatctggtcagttgtcatggaagatttgatgtcgaaaggaatgcgctatgctaatcaggctcttctgtctggatgttcagctgggggtttagcatctatactacattgcgacgaattccggcatttatttccaagaactgctagagtcaagtgcctcagtgatgctggtttattccttgacgtacctgacatctctggttggcgcacgttaagatatatgtttgcaggagtggtcacgctgcaggggatgcaaaagaacctgccccagggttgtactaaacgcttcaatccaatcatgtgctttttccctcagcgatcaattgctagcgtcaggactccactttttcttgtcaatacagcttatgatacatggcagatccaggtcagtttagctcctgcctcagctgatcatcatggaaactggaatggatgcagaaaaaactatgcacgctgcactggatcacaaattagttttcttcaaggtttcagaaatcaaatgctctatgctgtaagaggcttctcaaggttgaagaaaaatggattgtttataaattcatgttttgctcattgccagacagagagacaggacacatggttttctccaggttctccccacattaaaagcaaggcaaggccattccaacctaacttgttattctctgaatctgttggcaactggtattttgatcgtgctgttattatggctattgactgtccgtacccttgtgaccatacctgccaccacctggtgttcaagtga

SEQ ID NO: 58 - protein, 437 aa, Populus trichocarpa
MMTLYLWLGFMYGLMMCSLTWKCVNCFEFEHSQPLPLQDWNNNVTYKAAAEAFAYAYARRTPPLMVGLTLVNAAASKGAVCLDGSLPGYHIHRGYGSGANSWLVQLEGGGWCNSIRKCVFSKKTRHGSSHYMEKQIPFEGILSNKAEENPDFYNWNRVKVRYCDGGSFSGDSQNEAAQLYFRGQRIWSVVMEDLMSKGMRYANQALLSGCSAGGLASILHCDEFRHLFPRTARVKCLSDAGLFLDVPDISGWRTLRYMFAGVVTLQGMQKNLPQGCTKRFNPIMCFFPQRSIASVRTPLFLVNTAYDTWQIQVSLAPASADHHGNWNGCRKNYARCTGSQISFLQGFRNQMLYAVRGFSRLKKNGLFINSCFAHCQTERQDTWFSPGSPHIKSKARPFQPNLLFSESVGNWYFDRAVIMAIDCPYPCDHTCHHLVFK

SEQ ID NO: 59 - DNA, 1290 bp, Populus trichocarpa
atgatgacgttgtacttgtggttgggatttatgtatgggttaatgatgtgctctttaacatggaaatgtgtaaactgttttgaattcgaacactctcagcctctgcctctccaagattggaataataatgtcacttataaagcagcagcagaagcatttgcatatgcatatgctcgtcgcacaccaccgttaatggtgggtcttacacttgttaatgcagctgcttcaaagggagctgtctgcctggacggctcattaccagggtaccacatccacagaggatatggatcaggcgcaaacagttggctcgttcaattggagggcggaggatggtgtaattcaatcagaaaatgtgtttttagtaagaaaacacgccatggttcttcacattatatggaaaagcagataccttttgaaggcatactcagcaacaaagctgaagaaaatcctgatttttataattggaacagggtcaaggttcgttattgtgatggtggatctttcagtggagacagtcaaaatgaggcagcacaactctattttagaggacaaagaatctggtcagttgtcatggaagatttgatgtcgaaaggaatgcgctatgctaatcaggctcttctgtctggatgttcagctgggggtttagcatctatactacattgcgacgaattccggcatttatttccaagaactgctagagtcaagtgcctcagtgatgctggtttattccttgacgtacctgacatctctggttggcgcacgttaagatatatgtttgcaggagtggtcacgctgcaggggatgcaaaagaacctgccccagggttgtactaaacgcttcaatccaatcatgtgctttttccctcagcgatcaattgctagcgtcaggactccactttttcttgtcaatacagcttatgatacatggcagatccaggtcagtttagctcctgcctcagctgatcatcatggaaactggaatggatgcagaaaaaactatgcacgctgcactggatcacaaattagttttcttcaaggtttcagaaatcaaatgctctatgctgtaagaggcttctcaaggttgaagaaaaatggattgtttataaattcatgttttgctcattgccagacagagagacaggacacatggttttctccaggttctccccacattaaaagcaaggggatagcggagtctgttggcaactggtattttgatcgtgctgttattatggctattgactgtccgtacccttgtgaccatacctgccaccacctggtgttcaagtga

SEQ ID NO: 60 - protein, 429 aa, Populus trichocarpa
MMTLYLWLGFMYGLMMCSLTWKCVNCFEFEHSQPLPLQDWNNNVTYKAAAEAFAYAYARRTPPLMVGLTLVNAAASKGAVCLDGSLPGYHIHRGYGSGANSWLVQLEGGGWCNSIRKCVFSKKTRHGSSHYMEKQIPFEGILSNKAEENPDFYNWNRVKVRYCDGGSFSGDSQNEAAQLYFRGQRIWSVVMEDLMSKGMRYANQALLSGCSAGGLASILHCDEFRHLFPRTARVKCLSDAGLFLDVPDISGWRTLRYMFAGVVTLQGMQKNLPQGCTKRFNPIMCFFPQRSIASVRTPLFLVNTAYDTWQIQVSLAPASADHHGNWNGCRKNYARCTGSQISFLQGFRNQMLYAVRGFSRLKKNGLFINSCFAHCQTERQDTWFSPGSPHIKSKGIAESVGNWYFDRAVIMAIDCPYPCDHTCHHLVFK

SEQ ID NO: 61 - DNA, 1260 bp, Populus trichocarpa
atgaagcttttcggcttctggactgctgctgctgttctttgtctttttggggcatgggaggtaaatgggatcttggagatcaatgaagaagagctgttttacactgaaactaatgcttcttattataatgaatctaaagctgtttttggaaataatgctttgttggttggcctcactctcatcaaatcagctgctgctaaaggagcagtctgtttggatggaacattgcctggataccattggcatcgtgggtatggttctggggcaaatagttggcttattcaattggagggaggaggatggtgtaatactgtcagagcttgtgtttaccgtaaaaaaactcggcgaggttcatctaactacatggaaaagcaggtggcgtttacaggaatactgagcaataaacctgaagaaaatcctgattttttcaactggaacagagtaaaactccgttactgtgatggtgcctcttttaccggggacagtgaacataaggctgcacagttgcaatttagaggacaacgtatatggtcagctgcaatggaagatttaatgtccagtggaatgcgctatgccaatcaggctcttctttctggctgctctgctgggggtctagcttctattctacactgtgacgagtttagggatttgtttccaagaacaactagagtgaaatgcctgagtgatgctggtttattccttgatgtagttgatgtttctggtgggcgcaccttaagaaacgtatacagtggagttgtcggcttgcagggggtgcagaataaccttccacgtatatgcaccaaccaccttgatccaacttcttgcttcttcccacaaaacataatcggcaatgttaaagccccattgttcattctcaatacagcctatgattcatggcagatccagtccagcttagctccaccatctgctgatccccatggctactggagcaattgcagaaaggaccactcaaaatgttctgcatctcaactccaatttctgcaaggatttaggaatcaaatgctaaatgcaataaaaggcttttcaaattctagacagaatggattgtttataaattcatgttttgctcactgccaatcagagaggcaagatacatggtttgctgatgattctcccgtccttggaagcaggcctattgcacttgctgttggagattggtatttcgaccgtgcaggcgagaaggctattgattgtccctatccctgtgacaacagctgccacaatctggtttttagatga

SEQ ID NO: 62 - protein, 419 aa, Populus trichocarpa
MKLFGFWTAAAVLCLFGAWEVNGILEINEEELFYTETNASYYNESKAVFGNNALLVGLTLIKSAAAKGAVCLDGTLPGYHWHRGYGSGANSWLIQLEGGGWCNTVRACVYRKKTRRGSSNYMEKQVAFTGILSNKPEENPDFFNWNRVKLRYCDGASFTGDSEHKAAQLQFRGQRIWSAAMEDLMSSGMRYANQALLSGCSAGGLASILHCDEFRDLFPRTTRVKCLSDAGLFLDVVDVSGGRTLRNVYSGVVGLQGVQNNLPRICTNHLDPTSCFFPQNIIGNVKAPLFILNTAYDSWQIQSSLAPPSADPHGYWSNCRKDHSKCSASQLQFLQGFRNQMLNAIKGFSNSRQNGLFINSCFAHCQSERQDTWFADDSPVLGSRPIALAVGDWYFDRAGEKAIDCPYPCDNSCHNLVFR

SEQ ID NO: 63 - DNA, 1314 bp, Sorghum bicolor
atgggggtgcatgcgcatggggctgttgccaaagccaaaccctgcagcagcagcagcagcagcaggcggcttttcctgttggttgttgtactcgtcgtcctcataggtagctactgcgccgccgccgctgcagatgaggagatgaacagcagcagtaataggggcagccggagccggaggaggaggaggagcaggagcaggagacgggccgctgccacggcggccgacgcggtgacgccggcgccgctcatggtgcccatcaccatcctcaagtccgccgtcgactcgggagccgtgtgcatggacggaacaccgcctgcttaccacctacaccctggctccggggctggcaacaatagctggatcgtcaacctggagggaggcggttggtgcaacaacgttcgggcgtgccagttccgcaaggccagccgccgcggctcgtcggacctcatggagaaggagatccccttcggcggcatcatgagcagcagccctgtcgataaccctgatttctacaagtggaaccgggtgaagatccgctactgcgacggcgcgtccttcgccggagaaggcttcgacaaggagaacgggttttacttccgcgggcagcgcatctgggacgccaccgtccggcacctcctctccatcgggatggcctccgcagagcaggtgctgctcaccggctgctccgccggcggcctggccgtcatactgcactgcgaccagttccaggccttcttccctcgctccaccaccgtcgtcaagtgcctcgccgacgccggcctcttcctcgacgcctccgatgtctccggcggccgcagccttcgttcctactactccgacatcgtggccatgcagggcgtggctcccaacctgccgccggcctgcactgcccgtctcgacaccacctcgtgcttcttcccgcagaatgtaatcgatggcatcaacacccccatcttcctgctcaacgcagcatacgacgtatggcagatacaggagagcctggcacccaccggagctgaccccagcggagcctggcgggcctgcaagtccaaccactctgcctgcgacgcatcccagatgaaattcctgcaagatttcagagaccagatggtagcatcggtgaacaacggcttcgctggctccaggagcaacgggctcttcatcaactcctgcttcgcgcactgccagtccgagctgccgatgacatggagcgacaacgcggcaggtggtggtgcctccccggccattcaaagcagggtaacttgcaatgcagccatccatatatacacacatataaaagcaataaaataa

SEQ ID NO: 64 - protein, 437 aa, Sorghum bicolor
MGVHAHGAVAKAKPCSSSSSSRRLFLLVVVLVVLIGSYCAAAAADEEMNSSSNRGSRSRRRRRSRSRRRAAATAADAVTPAPLMVPITILKSAVDSGAVCMDGTPPAYHLHPGSGAGNNSWIVNLEGGGWCNNVRACQFRKASRRGSSDLMEKEIPFGGIMSSSPVDNPDFYKWNRVKIRYCDGASFAGEGFDKENGFYFRGQRIWDATVRHLLSIGMASAEQVLLTGCSAGGLAVILHCDQFQAFFPRSTTVVKCLADAGLFLDASDVSGGRSLRSYYSDIVAMQGVAPNLPPACTARLDTTSCFFPQNVIDGINTPIFLLNAAYDVWQIQESLAPTGADPSGAWRACKSNHSACDASQMKFLQDFRDQMVASVNNGFAGSRSNGLFINSCFAHCQSELPMTWSDNAAGGGASPAIQSRVTCNAAIHIYTHIKAIK

SEQ ID NO: 65 - DNA, 1248 bp, Solanum lycopersicum
atggcgaagctattgatgtggtttttgggtgtgttttttgtgtttacaaaattagttgattgttatgaatttgaagagtttttttacaataaaactgaaggggcattcttggaaagtgtgtatggagcttctgctgctgctcctcctccacttatgattggtcttacaatcatccatggtgctgctgctagaggagctgtgtgtctggatggaacactaccaggttaccatatccatagaggttatgggtctggggcaaacagttggcttattcaattggagggtggaggatggtgcaacagtgttagaagctgtgtttatcgcaaaaaaacaagacgaggatcatcaaattacatggaaaaacagattccttttgttgggattttgagtaacagggctgaagaaaatccagatttttataactggaatagagtaaaagttcgctactgtgatggtgcctcatttaccggggatagtgaagataaggctgcagggttgcaatatagaggcaagcgcatatatcaagctgcaatggaggagttaaggtcaaaaggaatgcgatacgccaagcaggctcttctctctggatgttctgctggtggtctagcttcaataatgcattgtgatgatttcagcaattcgctcccacatactaaagtgaagtgcctgagtgatgctggattatttatggacgcaaatgatgtatctggaggacatgccatcagagatttctttgggggtgtggttaagacacagggtcttcagaatacgctaccaagaacttgcaccaaccaccttgatgcaacctcgtgtttctttcctcagaatttgatcaacaacatcaggactcctctttttctactgaatgctgcctatgattcctggcaacttcaggaaagcttagctcctcatacagctgatcctcacggcttatggcatgactgtacactcaacaatgaaagatgttctccttctcaaattcaatttttgcaaggttttaggattcatatgcttaatacggttaaaagatttgctgcttcaagacaaaatggtttgtttataaactcatgctttgcccactgccaatctgagaggcaagatacatggttctcggataattccccaactattaataacaagccgattgcacttgcagttggagattggtactttgatcgtagtggtgtgaaggcgattgactgtgcatatccatgtgacagaacatgtcacaacctggtctttaagtga

SEQ ID NO: 66 - protein, 415 aa, Solanum lycopersicum
MAKLLMWFLGVFFVFTKLVDCYEFEEFFYNKTEGAFLESVYGASAAAPPPLMIGLTIIHGAAARGAVCLDGTLPGYHIHRGYGSGANSWLIQLEGGGWCNSVRSCVYRKKTRRGSSNYMEKQIPFVGILSNRAEENPDFYNWNRVKVRYCDGASFTGDSEDKAAGLQYRGKRIYQAAMEELRSKGMRYAKQALLSGCSAGGLASIMHCDDFSNSLPHTKVKCLSDAGLFMDANDVSGGHAIRDFFGGVVKTQGLQNTLPRTCTNHLDATSCFFPQNLINNIRTPLFLLNAAYDSWQLQESLAPHTADPHGLWHDCTLNNERCSPSQIQFLQGFRIHMLNTVKRFAASRQNGLFINSCFAHCQSERQDTWFSDNSPTINNKPIALAVGDWYFDRSGVKAIDCAYPCDRTCHNLVFK

SEQ ID NO: 67 - DNA, 1251 bp, Solanum lycopersicum
atggcggaggttctgagggggttttggggtgtagtttttgttgtgtttttggtacttagcaaatgggtagattcacatgaatttgaagattccattttcatgaaaacctcttctggtgatggtgccattactccaactcctcttttgattgctcttaccctcattcagggagctgctgctaaaggagctgtgtgtctggatggaactctaccaggttatcacatacatcctggttctgggtcaggggcaaacagttggctcattcaattggagggtggaggatggtgtaacaccgtcagaaattgtgttttccgcaaaacgaccaggcgtggctcatcaaaattcatggagaaacagattcaatttactgggattctgagtaacaaggctgaagaaaatccagatttttttaactggaatagagtaaaagttcgttactgcgatggggcctcctttacaggggacagtgaaaataaggtttgtaaggatgcacaactgcaatttagaggtcaacgtatatgggaagcagcaatggcggagttaatgtcgaaaggaatgcaaaatgcccagcaggctctactctctggatgttctgctggtggtctagcttcaatattgcattgcgatgagttccgcactctgttcccaagtagtaccaaagtgaagtgcctaagtgatgccggattatttatggatgcaactgatgtatctggtgggcacgcacttagagatgtttttaaaggcgtagtaagcgtacagggtcttcagaagatgttaccaagtaattgtaccaacaaacttgatccaacctcttgcttctttcctcagaatttgatcggcaatatcaagactccattatttcttctaaatgctgcctatgatttctggcagattcaatccagtttggctcctccagtagccgatcctcatgggttgtggcatgattgtaaacgtgattacaaaaaatgttctgcatcacaaattcaatttctacaagatttcagaaatgatatgctaaatgctattaaaggcttcggtgcctcaacacaaagtgggttgttcataaactcttgcttcgctcattgccaatccgagaggcaggatacatggtttgctgacgattctccccttatcgataacaagacgattgcacttgcagttggagattggtattttgatagagaaggaatgaaggcgattgactgtgcttatccatgtgataaaacatgtcacaacatggtgtctaaataa

SEQ ID NO: 68 - protein, 416 aa, Solanum lycopersicum
MAEVLRGFWGVVFVVFLVLSKWVDSHEFEDSIFMKTSSGDGAITPTPLLIALTLIQGAAAKGAVCLDGTLPGYHIHPGSGSGANSWLIQLEGGGWCNTVRNCVFRKTTRRGSSKFMEKQIQFTGILSNKAEENPDFFNWNRVKVRYCDGASFTGDSENKVCKDAQLQFRGQRIWEAAMAELMSKGMQNAQQALLSGCSAGGLASILHCDEFRTLFPSSTKVKCLSDAGLFMDATDVSGGHALRDVFKGVVSVQGLQKMLPSNCTNKLDPTSCFFPQNLIGNIKTPLFLLNAAYDFWQIQSSLAPPVADPHGLWHDCKRDYKKCSASQIQFLQDFRNDMLNAIKGFGASTQSGLFINSCFAHCQSERQDTWFADDSPLIDNKTIALAVGDWYFDREGMKAIDCAYPCDKTCHNMVSK

SEQ ID NO: 69 - DNA, 1741 bp, Zea mays
tgcacgaggctcccgtgtgtgggtctagatccactcctccccgtgctcactgctcatccgcgaacaggttgagcggggacgccgtggaggggcgagggggagccagattgagccatggcctcctcctgggttcttgccctggttcttgcgctgtcggcaggcgcaagcctggcgcggggctccgagccgtggtggaacgagacgcaggtgtacgccaccaccgccaactccggtggcggcaacggcgtcttcgtcggcctcacgctcatccagtcggcggcggccaagggagcggtgtgcttggatggaagcttaccaggttaccacctccacagagggtttggatcaggagcaaacagttggctcgtcaatctcgagggcggaggctggtgcaatgatcgcagcagctgtgtgttccgcaagggcagtcgtcgtggatcatcaaatcacatggagaggcaactccagtttacagggatattgagtaacaaacctgaagagaatcccgatttctacaactggaatagagtgaaggtccggtactgtgatggtggatctttcactggtgatggctctgatgcggctgcaggcctttatttccgaggtcagcgcatttggcaggccgctatggatgacctaatggcccaaggaatgcgttatgctaatcaggcccttctttctggatgctctgccggtggtgtttctaccatacttcactgtgatgaattccgtggactgttcccatcaaataccagagtcaaatgcttagctgatgctggaatgtttcttgacactgttgatgtttctggccgccgggaaatgagatcctttttcaatggtattgtgagattgcagggttctggaagaagcttgcctaggtcttgcacctcacacatggacaaaacctcgtgctttttcccccagaatgtgttgccaaccatccgaaccccaacttttgttttgaacactgcctatgacgtgtggcagcttcaacaaagtgtggcccctagaacagctgatccccaaggtctttggtcaaagtgtaggacgaaccatgccttctgtaatagcaaccagctccagtttttgcaagggttcaggaaccagatgcttgatgccgtgaggggtttctctgcatcaaggcaaaatggtctgttcatcaactcatgttttgctcattgccagagcgagagacaggatacttggtacgcgaacaactcgccacgtcttggtaacaagaaaatcgctgacgctgtcggggactggttcttcgagagggggaatgccaagtacacagactgcccatacccttgcgatggcacttgccatcaccttgtgttcaggggagaccactaagatcattcttcagcaccaacaaattcatcagatggtacaaggatcaaaccccaatgggtacagaatggaaaacaaggtatagatacagataaggtgcaagtggtcggcttgcccatgtttgttcatcagtgagtcatatgactcactagtgcgaggacctcacccgcgaacgcgcggaggaggcctctgcattagattcacataccgtcatgatatcgattattttcattggaaaagcagtccactgattacgtaccagaacaattgagttacatactcatttcgtgtactgtattaatagacactagaacgttacatattcatttgtcctgaagctcgtactaaaaaaaaaaaaaaaaaaaactcgagggggggcccggtaccc

SEQ ID NO: 70 - protein, 413 aa, Zea mays
MASSWVLALVLALSAGASLARGSEPWWNETQVYATTANSGGGNGVFVGLTLIQSAAAKGAVCLDGSLPGYHLHRGFGSGANSWLVNLEGGGWCNDRSSCVFRKGSRRGSSNHMERQLQFTGILSNKPEENPDFYNWNRVKVRYCDGGSFTGDGSDAAAGLYFRGQRIWQAAMDDLMAQGMRYANQALLSGCSAGGVSTILHCDEFRGLFPSNTRVKCLADAGMFLDTVDVSGRREMRSFFNGIVRLQGSGRSLPRSCTSHMDKTSCFFPQNVLPTIRTPTFVLNTAYDVWQLQQSVAPRTADPQGLWSKCRTNHAFCNSNQLQFLQGFRNQMLDAVRGFSASRQNGLFINSCFAHCQSERQDTWYANNSPRLGNKKIADAVGDWFFERGNAKYTDCPYPCDGTCHHLVFRGDH

SEQ ID NO: 71 - DNA, 1972 bp, Hordeum vulgare
gacggtcggtcagtcacacacccacacctttttcttcttcctcccgcaggcagcatccgagatgctttgcctcccaaccgtgacgacgcggcaaccagtaacacctccgggttcacactgaaccagccacagcagtagtaaacacatcgcaccgcagcaccgaatctccggaagcggccctgccttttcctttcctttgtccgtcagcggccattgccagccagctgcgcttgcactcggccgcgtataagtacctttctctgctttggccacttccgcgatcctttctccttctccctctcctcttccagatccattcctctcccagtcccgggcgaggagcgagagagcttgaggggaagggcggatggccatgggttcttggccccttcttgccctgctcctcgggttcttggcgggagcggcgcgcggctccgagccgtgggcgaatgacacgcgggtctactccaccaatgccaactccggcagcggcagcaacggcgccttcgtcgccctcaccctcatccagtccgccgccgccaagggagccgtatgcttggatggaagcttaccaggttaccacctacaccgaggatctggatcagggtcaaacaattggcttgtcaatctggagggtggaggctggtgcaatgatgttaaaagctgtgtgttccgcaagggcagtcggcgtggttcatcaaaccacatggagaggcagctccagtttacaggcataatgagtaacagacctgaagaaaacccagatttctacaactggaacagagtgaaggttcggtattgtgatggtggatccttcaccggtgatggggctgacgcggcttcaggcctttatttccgaggtcagcgtatttggcaggctgccatggatgacttgatggcccagggaatgcgttctgctagtcaggcccttctttctggatgctctgctgggggtgcttctgctatacttcattgtgatgagttcaatggaatgtttccctcaaataccagagtcaagtgcctcgctgatgctggaatgtttcttgactctgttgatattgctggtcgtcgagaaatgagagaattattcaatggcattgtgagattgcagggttctggaagaagcttgcctcggtcttgtacctcccgcatggacaaaacctcatgctttttcccgcagaacgtgttgccaaacattcaaactccaacttttattgtgaacactgcttatgacgtgtggcagcttcaagagagtttggctcccaaaacggctgatccccaaggtctatggcaaagatgcaagcagaattacgcgtcttgtaatagcaatcaacttcagtttctaaatggctttaggaatgaaatgcttaacgccgtgaagggtttctccgcgtcagggcagaatggggtatttatcaactcatgttttgcccattgccagagcgagaggcaggatacatggtactcgagcaactctcctcgtcttggcaacaagagaatcgcagaagcggtcggtgactggttcttcgagaggggcaacgccaagtacaccgactgtgcgtacccttgcgacggcacatgccatcaccttgtgttcaaggggaggcatctttaataccatcatatcctttgacaccagcagctgatgtgctgaaaacccaatgagtgggtacaaccaaaaaggaaggtatagatagaagaagatgggtgcaagtttgcggcttgcccggcgtccatcacctgagatatgatatgatagggcagggcctcgcacgcaaaagcggcaaggccctctgcgttattttagtttcacgtatcgtcgattctttccattgccaattgctcttcgctcgatgtatctgaacatttggaccacactgctgtataaccttacacattcatgcattgaatgtgataatacgaaattataaataatgtgcttacatttggaccaaaaaaaaaaaaaaaatac

SEQ ID NO: 72 - protein, 415 aa, Hordeum vulgare
MAMGSWPLLALLLGFLAGAARGSEPWANDTRVYSTNANSGSGSNGAFVALTLIQSAAAKGAVCLDGSLPGYHLHRGSGSGSNNWLVNLEGGGWCNDVKSCVFRKGSRRGSSNHMERQLQFTGIMSNRPEENPDFYNWNRVKVRYCDGGSFTGDGADAASGLYFRGQRIWQAAMDDLMAQGMRSASQALLSGCSAGGASAILHCDEFNGMFPSNTRVKCLADAGMFLDSVDIAGRREMRELFNGIVRLQGSGRSLPRSCTSRMDKTSCFFPQNVLPNIQTPTFIVNTAYDVWQLQESLAPKTADPQGLWQRCKQNYASCNSNQLQFLNGFRNEMLNAVKGFSASGQNGVFINSCFAHCQSERQDTWYSSNSPRLGNKRIAEAVGDWFFERGNAKYTDCAYPCDGTCHHLVFKGRHL

SEQ ID NO: 73 - DNA, 1257 bp, Oryza sativa Japonica Group
atggcgatgatggagaggattggggtcaccaagcttcatcatcatcttcttcttcttgttcttcttctcgtcgtcgccgccgccggcggcggcagcgtacaggcggcggaggaggatgagatgagcggccggaggaggagaagcaggcggcggcgtgcggcggacgtgatggtgcccatcaccatcctcaactccgccgtcgacaagggagccgtgtgcatggacgggacgccgccggcgtaccacctggacccgggctccggcggcggcaaccggagctgggtggtcaacctggagggcggcgggtggtgcaacaacgcccgcacgtgccgcttccgcaccgccagccgccacggctcctccgaccacatggagcgccgcatcgccttcaccggcatcatgagctccgccgccgccgacaaccccgatttccacagctggaaccgcgtcaagatccgctactgcgacagcgggtccttcgccggcgacgccttcaacgagggattgaagctgcaattccgggggcagcgcatctggggggcggtgatccagcacctgctcgacgtcggcatggcctccgccgagcatgtgctgctcaccggctgctccgccggcggcctcgccgcgatcctccactgcgaccagctccgcgccctcctccccgccgccgccaccgtcaagtgcctctccgacggcggcctcttcctcgacgccgtggacgtcgccggcggcaggagcctgaggtcatactacggcgacgtcgtcggcctgcaggcggtggcgcccaaccttcccgagacctgcaccgaccatctcgacgccacctcgtgcttcttccctcagaacataatcgacggcataaagacacccatcttcctgctgaatgcggcgtacgacgtctggcagatcgagcagagcctggcccctaacgcagctgacaccagcggcacctggcgagtctgcaagttcaaccgcgcagcctgcaacgcgtctcagctgcagttcctgcaaggtttcagagatcagatggtggcagcggtgagagtcttctccgagtcgaggagcaacgggctgttcatcaactcgtgcttcgctcactgccagtccgagctgacggccacctggaatggtggctctcctgctctccagaacaagggaattgcaaagtctgttggtgactggtactttggtcgagctgaggtgaaggccatcgattgcccctacccctgtgacaaaacatgccacaacatcatatga

SEQ ID NO: 74 - protein, 418 aa, Oryza sativa Japonica Group
MAMMERIGVTKLHHHLLLLVLLLVVAAAGGGSVQAAEEDEMSGRRRRSRRRRAADVMVPITILNSAVDKGAVCMDGTPPAYHLDPGSGGGNRSWVVNLEGGGWCNNARTCRFRTASRHGSSDHMERRIAFTGIMSSAAADNPDFHSWNRVKIRYCDSGSFAGDAFNEGLKLQFRGQRIWGAVIQHLLDVGMASAEHVLLTGCSAGGLAAILHCDQLRALLPAAATVKCLSDGGLFLDAVDVAGGRSLRSYYGDVVGLQAVAPNLPETCTDHLDATSCFFPQNIIDGIKTPIFLLNAAYDVWQIEQSLAPNAADTSGTWRVCKFNRAACNASQLQFLQGFRDQMVAAVRVFSESRSNGLFINSCFAHCQSELTATWNGGSPALQNKGIAKSVGDWYFGRAEVKAIDCPYPCDKTCHNII

SEQ ID NO: 75 - DNA, 1191 bp, Oryza sativa Japonica Group
atggcagcgaccagcggcaagctccggccgcccttccggcttctcctcctgctcctggccgccgccgtcgcccgctcggtggacggcgtcgagctgaccctcctcaccggcgctcgagagaagggcgccgtgtgcttggatgggagcccgccgggctaccacctgcagagaggcttcggctctggagagcacagctggtttatccatcttcagggaggagcctggtgcaacaccatcgaagattgttccaaacgcaaaatgagcgcgtatggttcatcgaaattcatgcgagcagtagagttcaacgggatactcagcaatgaccaacaactgaattctgatttttacaactggaacagagttttcataagatactgcgatggagcatcgttttctggggatggggaggctcaagatcaggatgggagcacactccacttcagaggattgcgcatctgggaagcagttattaatgagctaatgggaaaaggacttgcaactgctaaacaggccatactctcaggttgctctgctggtggtctggctgcactactacactgcaatgatttttatgcaagattttctaaggaggtttcagctaaatgccttcctgatgctggatttttccttgatattgaggatttatccggggagaggcacatgtggtctgtattcaatggaactgttcatcttcagaatgttacacaggttttgtcaaaggactgtcttgcaaagaaggatccaacagagtgcttctttcctgctgagcttgttaagagcatcaccgctcccacgcttattctgaactctgcttatgattcttggcagatacaaaatgcccttgcgccagatggatcctttcctggacagtcatggtccagttgcaaaactgacattcgaaattgtagttccacacaaatccaagtattcaatggattcaggaataaatttgtcgatgacatagaggttgtgaaagacaaaaaggactggggtcttttcattgattcatgtttcactcactgtcaaacgccattcgacatctcatggaactcacaggcctccccagttctcggtaacaagattgtcgcggaggctattggggattggtatttcgagagaagctatgaagtgaaagaaatcgactgcgagtatccgtgtaaccccacatgtagcagccagctgcctaaatga

SEQ ID NO: 76 - protein, 396 aa, Oryza sativa Japonica Group
MAATSGKLRPPFRLLLLLLAAAVARSVDGVELTLLTGAREKGAVCLDGSPPGYHLQRGFGSGEHSWFIHLQGGAWCNTIEDCSKRKMSAYGSSKFMRAVEFNGILSNDQQLNSDFYNWNRVFIRYCDGASFSGDGEAQDQDGSTLHFRGLRIWEAVINELMGKGLATAKQAILSGCSAGGLAALLHCNDFYARFSKEVSAKCLPDAGFFLDIEDLSGERHMWSVFNGTVHLQNVTQVLSKDCLAKKDPTECFFPAELVKSITAPTLILNSAYDSWQIQNALAPDGSFPGQSWSSCKTDIRNCSSTQIQVFNGFRNKFVDDIEVVKDKKDWGLFIDSCFTHCQTPFDISWNSQASPVLGNKIVAEAIGDWYFERSYEVKEIDCEYPCNPTCSSQLPK

SEQ ID NO: 77 - DNA, 1293 bp, Oryza sativa Japonica Group
atgccgcctctcttctccgcgccggcgctccaccgccgccgccttctccgccacgccgccgcattcgcccttgtgctcctcgccgtcgccctcctcttcctcctcctcgtacacccccgctcgctcggcaccccttccccttccccgtcctacggccaccgcctccccacgctcgtcgacctcaccctagtccacggcgccaaggagaagggcgctgtctgcctcgacgggaccccgcctgggtaccactggctgccaggcttcggcgacggatctaacaaatggctcctccacctagagggcgggagctggtgcaggaatcgcacgtcctgtgatcatcgcaagaaaaccagtcttggctcatctgcttacatggaaacccgggtcgagttcgtcggcatcctgagcgacgacaaggcccagaacccagatttttacaactggaacaaggtcaagatcaggtattgtgatggtgcctccttatctggaaatgtccaagatgaacaccagtatggcgccactttcttcttcagaggccagcgcatctgggaggccgtcatggctgaacttctacccaagggtctagcccgtgctaaacaggcttttcttacaggatgctctgcaggtggtctatccacatacattcactgtgatgatttccgtgcacttttaccaaaggattctactgttaagtgtcttgcagatggtggtttttttcttgacgtggaagacatttctgggagaaggtatatgcggggcttctataatgatgttgctcgtcaacaggatttgcggaaacggttccctggttgtagttcagatatggaaccagggcagtgctttttcccacaagaagtggcgaaaggcatcaccaccccaatgtttattctcaatccagcatatgatgtttggcaggtagagcatgtcttgactccagacggatctgaccctcaaaatctgtggcaagattgcagaatggatattaccaagtgtaatacgaaacagcttgaaattctacaaggttttagaaaatcactgcttgatgctataagtgaattcaagaagaaaaggggctggggcatgttcattgattcatgctttatacattgccaatccatgaagtctttggcttggcactccccatctgcttcgagaataaacaataagactgtggctgaagcggtgggcgactggttctttgatcggagagaggtgaaggaaatagactgtgaatatccgtgcaacccaacatgcttcaatgttgttcttgaacaaccctatcaggaaggctga

SEQ ID NO: 78 - protein, 430 aa, Oryza sativa Japonica Group
MPPLFSAPALHRRRLLRHAAAFALVLLAVALLFLLLVHPRSLGTPSPSPSYGHRLPTLVDLTLVHGAKEKGAVCLDGTPPGYHWLPGFGDGSNKWLLHLEGGSWCRNRTSCDHRKKTSLGSSAYMETRVEFVGILSDDKAQNPDFYNWNKVKIRYCDGASLSGNVQDEHQYGATFFFRGQRIWEAVMAELLPKGLARAKQAFLTGCSAGGLSTYIHCDDFRALLPKDSTVKCLADGGFFLDVEDISGRRYMRGFYNDVARQQDLRKRFPGCSSDMEPGQCFFPQEVAKGITTPMFILNPAYDVWQVEHVLTPDGSDPQNLWQDCRMDITKCNTKQLEILQGFRKSLLDAISEFKKKRGWGMFIDSCFIHCQSMKSLAWHSPSASRINNKTVAEAVGDWFFDRREVKEIDCEYPCNPTCFNVVLEQPYQEG

SEQ ID NO: 79 - DNA, 1194 bp, Oryza sativa Japonica Group
atggcgaatgggggtgtctgcctctcgtgctctgcacttgtctgcgcgctggtgtttctcacggtggatggtgatttcgtggacattacttacgtagcgagcgctgtggccaaaggcgcagtctgtttggatgggagccccccggcctaccatctcgcccggggttttggctccggcgtgaatagttggctggttcatttcgagggaggaggatggtgcagcaatgtgacgacctgcctgcaacgcaaacgcactcggttaggatcatcgaagcagatggcaaagcagattgccttctctggaatactgagcaacacccctgattacaacccggatttctacaattggaacaaggtcaaggttcggtactgtgatgggtcatctttcaccggcgatgtggaaaaagtagatcctgcaacaaagcttcactacagaggtgctagggtgtggcaagcagttatggatgatctgcttgcgaaaggaatgaacagtgccaataatgctctaatttcgggctgttctgctggtggtttaacttccatactacactgtgacagatttcgtgaccttttcccagtggataccaaagttaaatgcctttctgatgctggtttcttcatcaatgagaaggatattgctggagtggagtacattgtggcctttttcaatggcgtagctacaacccatggatcagcgaagaatttaccttctgcttgcacctccagattgtccccaggcatgtgcttttttcctcagaatgaggtgaaacagattcagacacctttgttcattctcaacgcagcgtatgattcctggcaggtaaggaacatcttggtgccaggatttgcagaccctcatggtaaatggcatagctgtaagcatgatatagatcaatgtcctgcatcgcaacttcaaatcttgcaaggattcagagacgattttctgaaagcactgaaggaacaagggactccctccaccagaggattgtttataaactcatgcttcgtgcattgccaatctgagacgcaggagacatggtttgcatctggttcccccatgcttgaaaccaaaacaatagcggatgcagttggagattggttctacgaccgcaatccgtttcagaagattgattgcccttacccttgcgattcaacctgccacaaccgaatctacgacgacccctcagaagcatag

SEQ ID NO: 80 - protein, 397 aa, Oryza sativa Japonica Group
MANGGVCLSCSALVCALVFLTVDGDFVDITYVASAVAKGAVCLDGSPPAYHLARGFGSGVNSWLVHFEGGGWCSNVTTCLQRKRTRLGSSKQMAKQIAFSGILSNTPDYNPDFYNWNKVKVRYCDGSSFTGDVEKVDPATKLHYRGARVWQAVMDDLLAKGMNSANNALISGCSAGGLTSILHCDRFRDLFPVDTKVKCLSDAGFFINEKDIAGVEYIVAFFNGVATTHGSAKNLPSACTSRLSPGMCFFPQNEVKQIQTPLFILNAAYDSWQVRNILVPGFADPHGKWHSCKHDIDQCPASQLQILQGFRDDFLKALKEQGTPSTRGLFINSCFVHCQSETQETWFASGSPMLETKTIADAVGDWFYDRNPFQKIDCPYPCDSTCHNRIYDDPSEA

SEQ ID NO: 81 - DNA, 1401 bp, Oryza sativa Japonica Group
atgccccgttactgtcggcaccctgctctctcctccctcccctttattgcttcctccctccctccctccctcttcacagcacaacacgctgccaccatttatgccactccctccctcccagctgtggtgacaggacgagcgtctcattctcaacctgaggctcaccttctctcagtcatattctccgtcttcttctccagtacgctcgcaatggctgcttcgtccggcgaatggctgagccgggcagctatggtgttggtgctaggtctcgtggtggcgtcgtcagctaaggcgggcgatgtggacatggtgttcctgaagagtgcagtgagcacgggagcagtttgcctggatgggagcccaccggtttaccacttctctcctggttctggctctggtgccaacaactggctggttcatatggagggaggaggttggtgcaggaatgcccaagagtgttctgtcaggcagggtaacttcaggggctcttccaaatttatgaggccactatcgttttcagggataataggtggcaaccagagaaacaatcctgatttctataactggaacaggataaaggtcagatattgtgatggctcatcatttactggcgacgttgaaacagtagaaacttcgacgaacctccatttcagaggggccagagtttggaatgccatcattgaagatctactagcaaaggggatgagcaaagcacaaaatgctcttctttctggttgttcggctggaggtctggctgccatactgcactgtgaccaattccgagatctgcttccagcaactgcaaatgtgaagtgcttttctgatgctggtttttttgttgatggaaaggatatcaccgggaatgattttgtcagaacattctacaaggatgtcgtaaatctacatggatcggctaaaaatttaccatcttcatgtacgtcaaagatgtcccctgatctgtgtttcttcccgcagaatgtagtgccaacattgcgcacaccgttgttcatacttaatgcagcatatgatgcatggcagatcaagaacgtcctagcacctagtgccgctgacaaaaagaagacttgggccaaatgcaagcttgatataacagcttgctcctcaagccagctcacaaccttgcaaaatttcaggacagattttctggcagctcttcctaaaccagagcagtccccagccaatttgagcatattcatagactcatgctatgcccactgccaatctgggtcccaggatacatggctcgctcaaggttctcctgtagttgagaagacgcaaattggtaaagcagtaggagactggttccacgatcgggaagtatcccggaggattgattgcccttatccctgcaacccaacctgcaagaaccgtgatgatgattaa

SEQ ID NO: 82 - protein, 466 aa, Oryza sativa Japonica Group
MPRYCRHPALSSLPFIASSLPPSLFTAQHAATIYATPSLPAVVTGRASHSQPEAHLLSVIFSVFFSSTLAMAASSGEWLSRAAMVLVLGLVVASSAKAGDVDMVFLKSAVSTGAVCLDGSPPVYHFSPGSGSGANNWLVHMEGGGWCRNAQECSVRQGNFRGSSKFMRPLSFSGIIGGNQRNNPDFYNWNRIKVRYCDGSSFTGDVETVETSTNLHFRGARVWNAIIEDLLAKGMSKAQNALLSGCSAGGLAAILHCDQFRDLLPATANVKCFSDAGFFVDGKDITGNDFVRTFYKDVVNLHGSAKNLPSSCTSKMSPDLCFFPQNVVPTLRTPLFILNAAYDAWQIKNVLAPSAADKKKTWAKCKLDITACSSSQLTTLQNFRTDFLAALPKPEQSPANLSIFIDSCYAHCQSGSQDTWLAQGSPVVEKTQIGKAVGDWFHDREVSRRIDCPYPCNPTCKNRDDD

SEQ ID NO: 83 - DNA, 1236 bp, Oryza sativa Japonica Group
atgggttgttcttgggctcttgctgctctggttcttggcttcttggtggtggcagtccatggctctgagccgtggctgaatcagacgcaggtctactccaccaatgccaactctggtagcaatggcgtcttcgtcgggattacgctcatccagtcggcggccgccaagggagccgtatgcttggatgggagcttaccagggtatcacctacaccgagggtttggatcaggggcaaacagttggcttgtcaatttggagggtggaggctggtgcaacgatgttaaaagctgcgtgtttcgcaagagcagtcggcgtggttcatcaaatcacatggagagccaactccagtttactgggataatgagtaacaggcctgaagaaaatcctgatttctacaactggaacagagtgaaggttcgatattgtgatggcggatccttcactggtgatggggctgatgcgtctgcaggcctttatttccgaggtcagcgtatttggcaggctgctatggatgatctgatggcccaaggaatgagatatgctaaccaggcacttctttctggatgctctgctggtggtgtttcaaccatacttcactgtgacgagttccgtggattgtttagcggcagtacaaacgtgaagtgccttgctgatgctggaatgtttctggactttgttgatgtttctgggcaacgagaaatgagggacttcttcaatggtattgtgagattgcagggttccggaagaagcctgcctaggtcttgtacctcccgcatggataaaacttcgtgctttttcccccagaatgtggtgccaaacattcaaactccaacttttattttgaacactgcttatgatgtgtggcagcttcaacaaagtgtggcccccaaaagggctgatccgcaaggtctatggcgaggatgtaggatgaatcatgcctcctgtaatagcaaccaactgcaatttttacaaggtttcaggaatcaaatgctcgatgcggtgaggggtttctccggcgcaaggcagaacggtctttttatcaactcctgtttcgcacattgccaaagtgagagacaggacacatggtacgcaggggattctcctcgtctcggtaacaagagaattgctgaagcagtaggcgactggtttttcgatagggcagacgcgaagtacacagactgtgcatacccttgtgatggtacctgccatcatcttacattcaggggagattactaa

SEQ ID NO: 84 - protein, 411 aa, Oryza sativa Japonica Group
MGCSWALAALVLGFLVVAVHGSEPWLNQTQVYSTNANSGSNGVFVGITLIQSAAAKGAVCLDGSLPGYHLHRGFGSGANSWLVNLEGGGWCNDVKSCVFRKSSRRGSSNHMESQLQFTGIMSNRPEENPDFYNWNRVKVRYCDGGSFTGDGADASAGLYFRGQRIWQAAMDDLMAQGMRYANQALLSGCSAGGVSTILHCDEFRGLFSGSTNVKCLADAGMFLDFVDVSGQREMRDFFNGIVRLQGSGRSLPRSCTSRMDKTSCFFPQNVVPNIQTPTFILNTAYDVWQLQQSVAPKRADPQGLWRGCRMNHASCNSNQLQFLQGFRNQMLDAVRGFSGARQNGLFINSCFAHCQSERQDTWYAGDSPRLGNKRIAEAVGDWFFDRADAKYTDCAYPCDGTCHHLTFRGDY

SEQ ID NO: 85 - DNA, 1242 bp, Zea mays
atggcctcctcctgggttcttgccctggttcttgcgctgtcggcaggcgcaagcctggcgcgtggctcagagccgtggtggaacgagacacaggtgtacgccaccaccgccaactccggtggcggcaacggcgtcttcgtcggcctcacgctcatccagtcggcggcggccaagggagcggtgtgcttggatggaagcttaccaggttaccacctccacagagggtttggatcaggagcaaacagttggctcgtcaatctcgagggtggaggctggtgcaatgatcgcagcagctgtgtgttccgcaagggcagtcgtcgtggatcatcaaatcacatggagaggcaactccagtttacagggatattgagtaacaaacctgaagagaatcccgatttctacaactggaatagagtgaaggtccggtactgtgatggtggatctttcactggtgatggctctgatgcggctgcaggcctttatttccgaggtcagcgcatttggcaggccgctatggatgacctaatggcccaaggaatgcgttatgctaatcaggcccttctttctggatgctctgccggtggtgtttctaccatacttcactgtgatgaattccatggattgtttccctcgaataccagagtcaaatgcctagctgatgctggaatgtttcttgacactgttgatgtttctggccgtcgggaaatgagatcctttttcaatggcattgtgagattgcagggttctggaagaagcttgcctaggtcttgcacctcacacatggacaaaacctcgtgctttttcccccagaatgtgttgccaaccatccgaaccccaacttttgttttgaacactgcctatgacgtgtggcagcttcaacaaagtgtggcccctagaacagctgatccccaaggtctttggtcaaagtgtaggacgaaccatgccttctgtaatagcaaccagctccagtttttgcaagggttcaggaaccagatgcttgatgccgtgaggggtttctctgcatcaaggcaaaatggtctgttcatcaactcatgttttgctcattgccagagcgagagacaggatacttggtacgcgaacaactcgccacgtcttggtaacaagaaaatcgctgacgctgttggggactggttcttcgagagggggaacgccaagtacacagactgcccatacccttgcgatggcacttgccatcaccttgtgttcaggggagaccactaa

SEQ ID NO: 86 - protein, 413 aa, Zea mays
MASSWVLALVLALSAGASLARGSEPWWNETQVYATTANSGGGNGVFVGLTLIQSAAAKGAVCLDGSLPGYHLHRGFGSGANSWLVNLEGGGWCNDRSSCVFRKGSRRGSSNHMERQLQFTGILSNKPEENPDFYNWNRVKVRYCDGGSFTGDGSDAAAGLYFRGQRIWQAAMDDLMAQGMRYANQALLSGCSAGGVSTILHCDEFHGLFPSNTRVKCLADAGMFLDTVDVSGRREMRSFFNGIVRLQGSGRSLPRSCTSHMDKTSCFFPQNVLPTIRTPTFVLNTAYDVWQLQQSVAPRTADPQGLWSKCRTNHAFCNSNQLQFLQGFRNQMLDAVRGFSASRQNGLFINSCFAHCQSERQDTWYANNSPRLGNKKIADAVGDWFFERGNAKYTDCPYPCDGTCHHLVFRGDH

SEQ ID NO: 87 - DNA, 1197 bp, Zea mays
atggcggacgggagcctctacgcctggtggtgctgtgccttgggctgggcgctggcgcttgtcgcagcggacggcttcctcgtggacatcacctatgtggaaagcgccgtggccaaaggagcagtgtgtttggatggtagtgcgccggcgtaccatctcgcccgcggctccggctccggtgagaacagctggctggtccatttcgaggggggaggatggtgcaacaatgtcaccacctgcctgcaacggaagcgcactcggttgggttcgtccaaggagatggcgacgcagattgccttctccggaatcctgagtgacacgccggatgacaacccagatttttacaattggaacaaggtcaaggttcggtactgtgatggttcatctttcactggagatgttgaagaagttgaccctgcaacaaagctacattatagaggtgccaggatatggcaagctgtcatggacgacctgcttgccaaagggatggacaaagctgaaaatgctctaatttcaggctgttctgctggtggtttaacctccatactacactgtgacagatttcatgaccttctgccgccggctgcgagggttaagtgcctttctgatgctgggttcttcattaatgagaaagacgttgcaggagttgggtacattgctgcctttttcaacgacgtcgttacaacacatgggtcagcaaagaatttgccgccttcatgcacttcgacgttacctccaggaacgtgctttttcccccagaacgaggtgaaacagatacagacacctctgttcatcctcaacgcagcatatgattcatggcaggtaaggaacattttggtgccaggagtagctgaccctcatggaaaatggcatagctgtaagcatgatatagaccagtgctctgcatcgcagctacgggtattgcagggattcaggggtgattttctgaaggaagtggcagaactagggaactccgactcgagagggttgttcataaactcatgcttcgtgcactgccagtctgagatacaggagctatggttctcatctgactcccccgtgctcggaaacacaacagtagcaaacgctgttggcgactggttcttcgaccgcagctccttccagaagatagactgcccatacccttgtgactcgacctgtcacaatcggatctacgatgactcatcacaagcatag

SEQ ID NO: 88 - protein, 398 aa, Zea mays
MADGSLYAWWCCALGWALALVAADGFLVDITYVESAVAKGAVCLDGSAPAYHLARGSGSGENSWLVHFEGGGWCNNVTTCLQRKRTRLGSSKEMATQIAFSGILSDTPDDNPDFYNWNKVKVRYCDGSSFTGDVEEVDPATKLHYRGARIWQAVMDDLLAKGMDKAENALISGCSAGGLTSILHCDRFHDLLPPAARVKCLSDAGFFINEKDVAGVGYIAAFFNDVVTTHGSAKNLPPSCTSTLPPGTCFFPQNEVKQIQTPLFILNAAYDSWQVRNILVPGVADPHGKWHSCKHDIDQCSASQLRVLQGFRGDFLKEVAELGNSDSRGLFINSCFVHCQSEIQELWFSSDSPVLGNTTVANAVGDWFFDRSSFQKIDCPYPCDSTCHNRIYDDSSQA

SEQ ID NO: 89 - DNA, 1383 bp, Zea mays
atggccaccgaactccggtcgccgctcctcccgccgccgccgcagcgacgactaagcccgcgggcagccgcgtgggcggcgctcgccgtctcggcgacggtcctgctcctccccttcctgatcggcagcagaagcaccaccaccagcaccagcagcacgagacacccccggccccgatcctccccaccatccaaccccgtggagctgaccctcctgaccgccgccagcgacaagggcgcggtgtgcctggacgggagccccccgggctaccacctgcaggcggggtccggcgccgggtccggcagctggctcatccatctcatggggggcggctggtgcgacaccgtccgcagctgctccgaccgcaggacgacctacctcggctcgtccctcttcatgcagaaagtcatggacttcactggcattctcagcaacgacccggcacagaatcctgatttctacagctggaacagagtgttcgttaggtactgcgacggggcatcgttttcgggggattcccagcgcgaggctgggcctgggaacggcacgctcttcttcagaggcctgcgcatctgggaggcagtcctcgacgagctcatgcacaagggcctcgcgcattccaaacaggccttgctcacaggttgttccgctggtggtctggccacgctgctgcactgcgacgattttcgcgcacggtttccccctgaggttcctgtgaaatgcctctccgatgccgggttctttgttgacgcgaaggatttgtcagggcagcgctccatgcgttctgtgtacagcggagttgttcatcttcagaacgttactaaagttttgcccaaggactgcctcctcgcaaacaaggacgatcccacgcagtgtttcttcccggcggagcttgttaagagcatcagcacgcccacgttgatcgtaaactctgcttacgactcttggcaggtacggtttgtcgttgcgccagacaggtcgtctcccgacgagtcatggcgcggctgcagagacgacgttcgcagatgcaattcctcccagatccaagtcctcaatgcatttaggaagacgatggtagatgacctcgtcgaggctgccgacggcaccaacagcagctggttcatcgactcttgcttcacacattgtcagactatcttcgacagctcaggatggaactcagcggccgcgccgaggatcgggaacaagacactgacggaggtgatcggggactggtactttggtaggagcccgagcccggtggtgaggcaggttggctgcgagtatccatgcaaccccacatgcaataggcagccaccagttgccggcttctacaacaaagctcttccgccgcgtgaacaagcgaacattcttgtattgggatga

SEQ ID NO: 90 - protein, 460 aa, Zea mays
MATELRSPLLPPPPQRRLSPRAAAWAALAVSATVLLLPFLIGSRSTTTSTSSTRHPRPRSSPPSNPVELTLLTAASDKGAVCLDGSPPGYHLQAGSGAGSGSWLIHLMGGGWCDTVRSCSDRRTTYLGSSLFMQKVMDFTGILSNDPAQNPDFYSWNRVFVRYCDGASFSGDSQREAGPGNGTLFFRGLRIWEAVLDELMHKGLAHSKQALLTGCSAGGLATLLHCDDFRARFPPEVPVKCLSDAGFFVDAKDLSGQRSMRSVYSGVVHLQNVTKVLPKDCLLANKDDPTQCFFPAELVKSISTPTLIVNSAYDSWQVRFVVAPDRSSPDESWRGCRDDVRRCNSSQIQVLNAFRKTMVDDLVEAADGTNSSWFIDSCFTHCQTIFDSSGWNSAAAPRIGNKTLTEVIGDWYFGRSPSPVVRQVGCEYPCNPTCNRQPPVAGFYNKALPPREQANILVLG

SEQ ID NO: 91 - DNA, 1266 bp, Zea mays
atggcggaccggccgtcgcttcctgctctcattattgctatcgcagttcttgctggcagttactgccgcgtggcgagctcggcctcgccggcggtggaagatgagctgcgcggtggaggaggagccggcggtccgacgacgatgcggcggcgcgcggcgtcggtgatggtgcccatcaccatcctcaagtccgctgttagcgacggagctgtgtgcatggatggaacgccacctgcttaccacttggatcctggctccggagcgggcagcagaagctggattgtgaacttagagggaggtgcgtggtgcaacagcgccaagacatgccggctcaccaggagctccggccgtggctcgtcggaccacatggccaaagagatccccttcaccggcatcatgagcagcagccgtaccgtgaatcctgatttctacatctggaaccgggtcaaggttcgctactgtgacggtggatcttttgccggcgaggccttcgacaaggacactgggatctacttccgagggcagcgcatctggaacgcggtcatccggcacctcctctccattgggatggccaatgctgaccaggtgctgctcgccggctgctcctcgggcggtctggcggtgatactgcactgcgaccagctccgcgccttcttcccgtccggctccaccgtcgtcaagtgcatctccgacggcggcctctacctcgacgccgtggacgtctccgggggccgcagcctgagatcctacttccaagacatcgtggccatgcaaggaatagcacagaacctgccgccggcttgcaccgcccgcctcgacgccacctcgtgcttcttcccgcagaacataatcgacggcgttaaaactccactgttcctgctaaatgccgcatacgacttcattcagattgtgctcagcctggcgccagacagagctgacccaagcggcgcttggcgagcctgcaagtccaaccgcacggcctgcagcgcttcccagatgagtttcctgcaagatttcagggaccagatggtggcgtccgtcaaaggcttctccggctccaggagcaacggggtcttcctaagctcctgcttcgcgcactgccagtccgagcagctgggcacctggaacaccaaaccaggtggctcccccaccattcaaaacaaggggatttcaaaatccgttggcgactggtactttgatcgagctgaggtgaaggcggtcgactgccgctatccctgcgacaacacttgccaccacattatatga

SEQ ID NO: 92 - protein, 421 aa, Zea mays
MADRPSLPALIIAIAVLAGSYCRVASSASPAVEDELRGGGGAGGPTTMRRRAASVMVPITILKSAVSDGAVCMDGTPPAYHLDPGSGAGSRSWIVNLEGGAWCNSAKTCRLTRSSGRGSSDHMAKEIPFTGIMSSSRTVNPDFYIWNRVKVRYCDGGSFAGEAFDKDTGIYFRGQRIWNAVIRHLLSIGMANADQVLLAGCSSGGLAVILHCDQLRAFFPSGSTVVKCISDGGLYLDAVDVSGGRSLRSYFQDIVAMQGIAQNLPPACTARLDATSCFFPQNIIDGVKTPLFLLNAAYDFIQIVLSLAPDRADPSGAWRACKSNRTACSASQMSFLQDFRDQMVASVKGFSGSRSNGVFLSSCFAHCQSEQLGTWNTKPGGSPTIQNKGISKSVGDWYFDRAEVKAVDCRYPCDNTCHHII

SEQ ID NO: 93 - DNA, 1230 bp, Arabidopsis thaliana
atggtgattcgctctctgctacaatgcagaacatggtctaagagtgactggcttctcgcttcaatcggaatagtcttgatcgtttattccttttctttgtccttcaattcaacttcagactctatcccctccgttgaccgtagcgatctagttaaactgaagctgtcgagtaaagctaaagagagaggagctttttgcttagatggaagcttacctggttatcactttcataagggttcaggatctggctccaatagctggcttctttatttagagggtggaggcgggtgccgtacaattgagtcatgttctgctagagcaatgactaggttaggttcttccaacttctttgaacatgaagtgcctttttttggcgttttaagcagtgacccatctcaaaaccctgacttctttaactggaacagagttatgatacggtactgtgatggtgcttgtttttctggacaccctgaagctgaattcaagaatgaaacacggcttttcttccgcggccagctcatttgggaggctatcatggatgaattgttgtcgatgggcatgtcacatgcgaaacgtgccatgctcacaggatgttctgctggtggcttgtctactctaatacattgtgactactttcgagaccatctgcctaaagatgcaactgttaaatgtgtttccgatggaggctatattcttaatgtgcttgatgtccttggaaacccaacaatgggatctttctttcatgatgttgttaccctgcagagcgtagataagagcttggatcagaattgtgttgccaaaatggaaccatctaagtgtatgtttcctcaagaatctcttaaaaacataagaactccggtatttcttgtcaacacagcctacgattattggcagattcaaaacggcctggtaccagattctccggatctagatgaaagatggaaaatttgtagactcaatattcaggaatgtgatgccgcacaaatgaaagttctgcatggtttccgcagttccctgatcgatgcgataggagaatttcatgtgaacaaagagggtgggatgtttataaattcgtgcaattctcattgccagataagagagtcatggcattccgcaacctcaacaagaatcgaaaataagacgattgcagagtctgtaggtgattggtacttcaaccgaaaaccggtgaagctaatcgattgtccttatccgtgcaatgcctcttgttga

SEQ ID NO: 94 - protein, 409 aa, Arabidopsis thaliana
MVIRSLLQCRTWSKSDWLLASIGIVLIVYSFSLSFNSTSDSIPSVDRSDLVKLKLSSKAKERGAFCLDGSLPGYHFHKGSGSGSNSWLLYLEGGGGCRTIESCSARAMTRLGSSNFFEHEVPFFGVLSSDPSQNPDFFNWNRVMIRYCDGACFSGHPEAEFKNETRLFFRGQLIWEAIMDELLSMGMSHAKRAMLTGCSAGGLSTLIHCDYFRDHLPKDATVKCVSDGGYILNVLDVLGNPTMGSFFHDVVTLQSVDKSLDQNCVAKMEPSKCMFPQESLKNIRTPVFLVNTAYDYWQIQNGLVPDSPDLDERWKICRLNIQECDAAQMKVLHGFRSSLIDAIGEFHVNKEGGMFINSCNSHCQIRESWHSATSTRIENKTIAESVGDWYFNRKPVKLIDCPYPCNASC

SEQ ID NO: 95 - DNA, 936 bp, Arabidopsis thaliana
atggtgaagcttttgttagtagggtttgttgtggctggtataatactgggaactcaagcaaatgaatatttagatttcaatgtgacagaaatagatcgcattgaggaattagagtttggattttccaaatatagctccaatttgaaccctttaatggttggtctcacccttatcagaggagctgattctggagctgtttgtttggatggaacattgcctggatatcacttgcaccgtggacatggatctggagctaatagctggctcattcaattggagggaggaggatggtgcaacaacatcaggacctgtgtatacaggaagactactcgacgtggttcctctaattatatggagaaacagcttcagtttacaggaatactgagtgacaaagctcaagaaaatcctgactttttcaactggaatagagttaagcttcgttactgcgatggcgcttctttcagtggagatggccagaatcaggctgcacaacttcagtttagaggagagcgtatctggagagccgcaatagatgatttgaaggcgaatggaatgcgatacgccaatcaggcacttctctccggatgctctgctggtggtttagcagcaatcttgcgctgcgatgagtttaggaacttattccctggatcaaccaaagtcaagtgcttgagtgatgcaggcttgttcttggacactgccgatgtttcaggcggccgcacaatcaggaacttatacaatggtgtcgtagaattgcagagtgtgaagaacaatcttccacgtatatgcacaaaccatcttgatccaacctcgtgtttcttcccacaaaatctgatcagtcaaatgaaaactccactttttatcgtcaacgcagcatatgatacatggcagattttgtatcctttggtagtaaccaatgcctcattggtatatgattaa

SEQ ID NO: 96 - protein, 311 aa, Arabidopsis thaliana
MVKLLLVGFVVAGIILGTQANEYLDFNVTEIDRIEELEFGFSKYSSNLNPLMVGLTLIRGADSGAVCLDGTLPGYHLHRGHGSGANSWLIQLEGGGWCNNIRTCVYRKTTRRGSSNYMEKQLQFTGILSDKAQENPDFFNWNRVKLRYCDGASFSGDGQNQAAQLQFRGERIWRAAIDDLKANGMRYANQALLSGCSAGGLAAILRCDEFRNLFPGSTKVKCLSDAGLFLDTADVSGGRTIRNLYNGVVELQSVKNNLPRICTNHLDPTSCFFPQNLISQMKTPLFIVNAAYDTWQILYPLVVTNASLVYD

SEQ ID NO: 97 - DNA, 1554 bp, Arabidopsis thaliana
atggggaggcttaagcaatgttggtcaagtctgctagtattggcagtgttggtgatcggaactggagccgttcccatcacttatctccaaagcgccgtcgctaaaggagccgtgtgtttggatgggagtgcaccagcttaccattttgacaaagggtttggttcgggtgttaacaattggatcgtccacatggagggaggaggatggtgtaccgacgttgcttcatgtaatgaacgtaagggtacaatgaagggttcttccaaattcatgaacaaagactttggattttccggtatcttgggtggcaagcaaagcactaacccagatttctacaattggaacagaatcaaagtacgatattgtgacggatcatcctttaccggcaatgtagaagccgttaatccggcaaacaagctgttcttccgcggtgcccgagtttggcgtgcggtggttgatgatcttatggctaaaggaatgaaaaacgctcaaaacgctatactctccggttgttcagctggagcattggctgcgattcttcattgtgacactttccgtgccatacttccccgaacagctagcgtcaaatgtgtttctgatgccggttactttatccacggtaaagatatcacaggaggatcatacattcaatcatattacagcaaagtcgtcgcactccacggatctgcaaagagtcttcctgtttcttgtacctcaaaaatgaaaccagaactctgtttcttcccgcaatacgtcgttccttccatgcgaacaccgctctttgtcatcaatgccgcttttgattcttggcagatcaagaacgttttggctccaactgctgttgataagggaaaagagtggaagaattgtaagcttgatcttaagaaatgtagtgccgctcagctcaaaaccgtccaagggtttagagatcagatgatgcgagcattgtcaccggttcacagtacaccgtctagaggattgttcttagactcgtgtcacgctcattgccaaggaggaagcgccgcctcttggtccggtgacaaaggtccccaagtcgccaatacgagaattgcgaaagcagtcggaaactggttttatggccggacatcgatggattcggcgtttgtggacagagcttgggacaaatgggttactacgggtaacgttggttcttcaggtaatccattgaaggctgctattttgattaactatgatcctacaggaccttctcgtctcttatcaacaatagctaaacaagaagggattgatatctatccagttgatctaaagcaatttatagatttcatgagatgtggcaatcttcctactgagacttttgttcttggatccaaccaatacataataacatctattcatgagaactggttcgctgctaggtgtttaaacacttcccagcctgctggtgaaggagctattgttatgcagactgcggtttacgtgttggttgctctatatgatggatcaattggttcagcttctcaagctatggctgcagctgatcagtttgcatcgcagctgagtcggaaaaacttctag

SEQ ID NO: 98 - protein, 517 aa, Arabidopsis thaliana
MGRLKQCWSSLLVLAVLVIGTGAVPITYLQSAVAKGAVCLDGSAPAYHFDKGFGSGVNNWIVHMEGGGWCTDVASCNERKGTMKGSSKFMNKDFGFSGILGGKQSTNPDFYNWNRIKVRYCDGSSFTGNVEAVNPANKLFFRGARVWRAVVDDLMAKGMKNAQNAILSGCSAGALAAILHCDTFRAILPRTASVKCVSDAGYFIHGKDITGGSYIQSYYSKVVALHGSAKSLPVSCTSKMKPELCFFPQYVVPSMRTPLFVINAAFDSWQIKNVLAPTAVDKGKEWKNCKLDLKKCSAAQLKTVQGFRDQMMRALSPVHSTPSRGLFLDSCHAHCQGGSAASWSGDKGPQVANTRIAKAVGNWFYGRTSMDSAFVDRAWDKWVTTGNVGSSGNPLKAAILINYDPTGPSRLLSTIAKQEGIDIYPVDLKQFIDFMRCGNLPTETFVLGSNQYIITSIHENWFAARCLNTSQPAGEGAIVMQTAVYVLVALYDGSIGSASQAMAAADQFASQLSRKNF

SEQ ID NO: 99 - DNA, 1167 bp, Arabidopsis thaliana
atgaaaacgcttttgtattggggttggagtagtctcgcaggactcattctcttcagcattcttgcacatggggaaatgaaaaccttcaacgagtccaatggaacaaatgcaaatgtcctgatggtaggactcacgctcgtccaagccgctgctgctaaaggagcggtgtgtctggatgggtcagtgcctggatatcatttgtgtcgcgggtatggttcaggagcaaacaactggatcattcagttgcagggaggtgcatggtgtgacagcatacaaaactgtcagagccgtaaagggagtggttatggatcatctaccttaatggagaaagagttggcatttttaggattactaagcaataaagccgctgaaaatccagacttttacaattggaacaaagtaaaagtccggtattgtgatggtgcatcctttgatggtgacagcgaaaacaaggcggcacaacttcagtatagaggaaagcgtatatttttagctgtcatggaagatttgatggaaaagggaatgcgtcaggcaaaacaggctttgctcagcggatgttcttctgggggtctttctgccattttacgatgcgatgatttcaataacttgtttcctcctaccaccacagtaaaatgcatgagcgatgctggcttcttcctcgacgccgttgatgtatctggaggtcattctttaaggcgtatgtattctggtgttgtgaacactcagggtttgcaaaacacacttcctcccacttgtacaagccatatcaaaccatttttgtgttttttccctcaatacataatcaaccaagtcaagaccccgttgtttattctcaactcgggatttgattcgtggcagattggaaatagtttagccccaccatctgctgataagagtggcagttggcataactgcagttttagctttaggtgcactgcctctcagatgcacttcttagaaggtttcaagatgagcatgttagatgcgttgaagaccttttcgaagtttagcaagaatggagttttaattacctcgggatgggctcattgtcaagcggagagacaagatacttggtttcctggatactctggagcgggcaaagctaaggggattgctgtggctgttggagattggtatttcgaaagaacaaaacagaatagctcatag

SEQ ID NO: 100 - protein, 388 aa, Arabidopsis thaliana
MKTLLYWGWSSLAGLILFSILAHGEMKTFNESNGTNANVLMVGLTLVQAAAAKGAVCLDGSVPGYHLCRGYGSGANNWIIQLQGGAWCDSIQNCQSRKGSGYGSSTLMEKELAFLGLLSNKAAENPDFYNWNKVKVRYCDGASFDGDSENKAAQLQYRGKRIFLAVMEDLMEKGMRQAKQALLSGCSSGGLSAILRCDDFNNLFPPTTTVKCMSDAGFFLDAVDVSGGHSLRRMYSGVVNTQGLQNTLPPTCTSHIKPFLCFFPQYIINQVKTPLFILNSGFDSWQIGNSLAPPSADKSGSWHNCSFSFRCTASQMHFLEGFKMSMLDALKTFSKFSKNGVLITSGWAHCQAERQDTWFPGYSGAGKAKGIAVAVGDWYFERTKQNSS

SEQ ID NO: 101 - DNA, 1335 bp, Arabidopsis thaliana
atgctcttaagtcactctcgttctccatataaaccaaggtatgtgatcaagtctaaaacatccatgatcaagaagtgtaaaatgaagaagcttctatggagttggatcattctcttcaacatccatgtaaatggaatgatgatggagtttgatgaaatggagtggttcacagttttcaatggaacaaaagtgtttcagactcaaaatgatgttttttctgaagctaagtttcctatggttggactcactctgattcaatctgctgctgctaaaggagctgtgtgtttggatggaagtcttcccggataccatttgcatcgcgggtttggttccggagcgaacaattggctcgttcaattagagggaggtggatggtgtgataccattagaaattgtgtttaccgtaaaaccactcgtcgtggatcttcttcatatatggagaaagagataccatttaccggcattctaagtgataaagccgcggataatccagacttttataactggaatagagtaaaagttcggtattgtgacggtggatcgtttagcggggatagcgaaaataaggctgcacaacttcagtttagaggaaagagaatttggttagctgctatggaagatttgatggcaaaaggtatgcgtcaagctaagcaggctctgctctctggatgttctgcaggaggtcttgcggtgattttacgatgtgatgattttgggaaattgtttcctccttccaccagagtgaaatgtttgagtgatgctggtttcttccttgatgccatcgatgtgtctggaggtcgatctcttagacgattatacgccggtgtggtcagattacagaatctgcaaaccaaccttcctcagtattgtgtaaaccgtcttaatcccacttcgtgttttttcccacaaaacctaatcaaccaagtcaagactccactttttattcttaatgctgcatatgattcttggcagattcaagagagtttagctccaaaatctgcagatccaagtggaagttggaatgattgtagacttaactacgccaagtgtagtgcatctcagatccaattcttgcaaggttttaggacgcgtatggtgaatttggtaaaaggtttcgcgatgccaagtaagaacggtgtgttcctcaattcgtgctttgctcattgccaaacagagaggcatgacacttggttcgcccaaaactctccagctattaagaacaagggtattgcagtagctgtgggagattggtatttcgaaagaggaggagcaaagctcatagactgtgcttatccttgtgacaagacttgtcacaatttggtctttagaagataa

SEQ ID NO: 102 - protein, 444 aa, Arabidopsis thaliana
MLLSHSRSPYKPRYVIKSKTSMIKKCKMKKLLWSWIILFNIHVNGMMMEFDEMEWFTVFNGTKVFQTQNDVFSEAKFPMVGLTLIQSAAAKGAVCLDGSLPGYHLHRGFGSGANNWLVQLEGGGWCDTIRNCVYRKTTRRGSSSYMEKEIPFTGILSDKAADNPDFYNWNRVKVRYCDGGSFSGDSENKAAQLQFRGKRIWLAAMEDLMAKGMRQAKQALLSGCSAGGLAVILRCDDFGKLFPPSTRVKCLSDAGFFLDAIDVSGGRSLRRLYAGVVRLQNLQTNLPQYCVNRLNPTSCFFPQNLINQVKTPLFILNAAYDSWQIQESLAPKSADPSGSWNDCRLNYAKCSASQIQFLQGFRTRMVNLVKGFAMPSKNGVFLNSCFAHCQTERHDTWFAQNSPAIKNKGIAVAVGDWYFERGGAKLIDCAYPCDKTCHNLVFRR

SEQ ID NO: 103 - DNA, 1251 bp, Arabidopsis thaliana
atgaagagtgtgttgcgtattgcggcggcgatattctggctttggctgtttatcgtgttaggtgtgattgggagtgggaatgtgagagatacagacgatgagatctcgttactcgaaagtcaattggtggtgacatctccgtcgcagcttcttatggtgcctctcactttgattcaggctgctgcctccaaaggagctgtgtgcctggatggaacactacctggttatcatctacaccctggttctggatcaggagctaaccggtggctcatccaactcgagggtggaggatggtgcaacacacgtaggagctgtatcttccggaaaaccactcgccgtggttcatcaaatcatatggagaaagttttggccttcactggaatattgagcaataaatctaatgagaatcctgacttcttcaactggaacagagtcaaattgcgttactgcgatggtgcctctttcaccggcgatagtcaggatgagagctcacaactttactatagaggacaacgaatctggcattcagctatggaagaactactctctaaaggcatgcaaaaagcagaacaggctctactttctggatgttcagctgggggattagcttccatcctacactgcgatcagttcaaggaactatttccgggcactacgacagtgaaatgcttaagtgatgctggaatgtttatggatgcagtggatgtctctgggggccactcgctccggaaaatgttccaaggtgttgttacagtacagaacctccaaaaggaactgtccactgcttgtacaaagcatttggatccaacttcgtgcttctttccccagaacttggtttcaggcattaagactccaatgtttcttctcaatgcagcatatgacgcttggcaggtacaagagagtttagctccaccatcagttgacctaagcggctcttggaaggcatgcaaatctgatcactcgcattgtaattcatctcagatccagttcttccaagacttcaggactcatatggtagatgctgtaaagtctttcgcgacatcgacacataacggtgtgttcataaactcatgcttcgctcactgccaatctgaaagacaggacacttggtatgcaccagattctcctactcttcatggcaagaccgttgctgaatctgttggtgattggtactttgacagaacaacagtgaaagccattgactgtccttacccctgtgacaaaacatgtcacaatctcatcttcaagtga

SEQ ID NO: 104 - protein, 416 aa, Arabidopsis thaliana
MKSVLRIAAAIFWLWLFIVLGVIGSGNVRDTDDEISLLESQLVVTSPSQLLMVPLTLIQAAASKGAVCLDGTLPGYHLHPGSGSGANRWLIQLEGGGWCNTRRSCIFRKTTRRGSSNHMEKVLAFTGILSNKSNENPDFFNWNRVKLRYCDGASFTGDSQDESSQLYYRGQRIWHSAMEELLSKGMQKAEQALLSGCSAGGLASILHCDQFKELFPGTTTVKCLSDAGMFMDAVDVSGGHSLRKMFQGVVTVQNLQKELSTACTKHLDPTSCFFPQNLVSGIKTPMFLLNAAYDAWQVQESLAPPSVDLSGSWKACKSDHSHCNSSQIQFFQDFRTHMVDAVKSFATSTHNGVFINSCFAHCQSERQDTWYAPDSPTLHGKTVAESVGDWYFDRTTVKAIDCPYPCDKTCHNLIFK

SEQ ID NO: 105 - DNA, 1284 bp, Arabidopsis thaliana
atggcgattccaaggtttagctctctgttacggtgtagaaaatgggctaaaagtgactggcttgtcgcttctataggatgcgtattgatcgtttttttcctctctttcttcttcgatcccacttcagactctgtcccctccgttgaccgatctcggccaatcatatctcctagcgatctggtcaagctgaagttgtcgagtgtagctaaagagagaggagctttttgtttggatggaagcttgcctgggtaccactttcatgagggttctggatctggctcccaaagctggcttgttcatttggagggtggaggctggtgcaacacagttgcgtcatgttctgctcgagcattgactaaattaggttcttccaactactttgaacaagaagtggcctttcaaggtgttttaagtagtgacccatctcaaaatcctgaattctttaactggaacaaggttgcgataaggtactgtgatggtgcttctttttctggacgccctgaagctgaattcaagaatggcacacggcttttcttccggggccagcttatttgggaggctattattgatgaacttttgtcaatgggcatgtcagatgccaaacaggccatacttacaggatgttctgccggtggcttggcaagtcttatacattgtgactactttcgagatcatcttccaaaagatgcagctgtcaaatgtgtttctgatggaggctactttctcaacgtgcctgatgtccttggaaacccaacaatgaggtctttctatcatgatgttgttaatttgcagggcgtagagaagagcttggatcagaaatgtgtagccaaaacggagccatctaagtgtatgtttcctcaagaattcctgaaaaacataagaactccggtatttcttgtcaatccagcctacgatttttggcagattcaacatgtcttggtaccaacttctgcggatccagataaaagttgggcaaagtgcagactcaatattaaggaatgtgatgccgaacagattaaagttctacacggttttcgcagttctatgatgactgcaattggggaatttcatcagaacaaagatggtgggatgttcatagattcctgctatgctcattgccagacagtcatgtccgtgacatggcactccctgacctcaccaagaatcgaaaataagacaattgcagagtctgtaggtgactggtacttcaacagaaaaccggtgaagctaatcgattgtccatacccgtgcaatccttcttgttacaacatgaatttcacatga

SEQ ID NO: 106 - protein, 427 aa, Arabidopsis thaliana
MAIPRFSSLLRCRKWAKSDWLVASIGCVLIVFFLSFFFDPTSDSVPSVDRSRPIISPSDLVKLKLSSVAKERGAFCLDGSLPGYHFHEGSGSGSQSWLVHLEGGGWCNTVASCSARALTKLGSSNYFEQEVAFQGVLSSDPSQNPEFFNWNKVAIRYCDGASFSGRPEAEFKNGTRLFFRGQLIWEAIIDELLSMGMSDAKQAILTGCSAGGLASLIHCDYFRDHLPKDAAVKCVSDGGYFLNVPDVLGNPTMRSFYHDVVNLQGVEKSLDQKCVAKTEPSKCMFPQEFLKNIRTPVFLVNPAYDFWQIQHVLVPTSADPDKSWAKCRLNIKECDAEQIKVLHGFRSSMMTAIGEFHQNKDGGMFIDSCYAHCQTVMSVTWHSLTSPRIENKTIAESVGDWYFNRKPVKLIDCPYPCNPSCYNMNFT

SEQ ID NO: 107 - DNA, 1260 bp, Arabidopsis thaliana
atgaggagcttgttgttgtggattgcggtggtcgtgtgcttgctatgttcagtcgcggcggtggttcaaagcggatctagcgacggatttgggaaacccagagatactgagactgcgatatcttttctggagtataaattgatggcgccttcggttccaatgatacctctcaccttgattcacggagctgactctaaaggagctgtgtgcttagatgggacgctacctggttatcatctagatcgtggttttggatcaggtgctaacagttggcttatccagcttgagggtggaggatggtgtaacaaccataggagctgtgtgtatcgcaaaacaagtcgacgtggttcctctaaattcatggaaaaagctttggccttcactggaattttgagcaatagatctgaagagaatcctgacttctttaattggaacaggatcaagttgcgttactgcgatggtgcgtctttctctggtgatagtcaggacgagagttcgcaacttttctatcgaggacaacgaatctggcaagtggctatggaagaattcctgtctttaggcatgaagcaagcaaaccaggctctgctctctggatgttcagctggaggattagcttctattttgcactgtgatgagttcagggaactattacctagttccacgaaagtaaaatgcttaagtgatgctggaatgtttctggactcagtggatgtctctgggggccactcgcttaggaatatgttccaaggtgttgttacagtgcagaacctccaaaaggacttgtccagtacttgtacaaaccatttggatcctacttcgtgcttttttccccagaacttggtttcagacattaaaaccccaatgtttcttctcaacacagcatatgactcttggcagatccaagagagcttagctcctcctactgctgatccaggcggtatctggaaggcatgcaaatcagatcactcgcgatgtaattcatcacagatccaattcttccaagaattcaggaatcaaatgctgtttgctgtaaactcattctcaaactctgaccagaacggtctttatataaactcttgcttcgcgcattgtcagactgaaagacaggacacttggtttgctcaagattctcctcaactaaacggaaagagagtcgcagagtctgtaggtgactggtacttcgaccgagcaaaaaatgtcaaagctatcgattgtccttacccttgtgacacaacatgtcacaatctgattttcgagtga

SEQ ID NO: 108 - protein, 419 aa, Arabidopsis thaliana
MRSLLLWIAVVVCLLCSVAAVVQSGSSDGFGKPRDTETAISFLEYKLMAPSVPMIPLTLIHGADSKGAVCLDGTLPGYHLDRGFGSGANSWLIQLEGGGWCNNHRSCVYRKTSRRGSSKFMEKALAFTGILSNRSEENPDFFNWNRIKLRYCDGASFSGDSQDESSQLFYRGQRIWQVAMEEFLSLGMKQANQALLSGCSAGGLASILHCDEFRELLPSSTKVKCLSDAGMFLDSVDVSGGHSLRNMFQGVVTVQNLQKDLSSTCTNHLDPTSCFFPQNLVSDIKTPMFLLNTAYDSWQIQESLAPPTADPGGIWKACKSDHSRCNSSQIQFFQEFRNQMLFAVNSFSNSDQNGLYINSCFAHCQTERQDTWFAQDSPQLNGKRVAESVGDWYFDRAKNVKAIDCPYPCDTTCHNLIFE

SEQ ID NO: 109 - DNA, 1194 bp, Arabidopsis thaliana
atgttcaagttgaagcaatggttgatttatttggtgtgttcgttagtaataatgaacacagaaggactgtttgtcaatattacatttgttcgaaacgcagtcgctaaaggggccgtttgtttagatggaagtccaccagcttatcatttggatagaggttctggaactggaatcaatagttggttgatacagcttgagggaggaggatggtgcaataatgtaacaaattgcgttagtcggatgcatactcgattaggttcatcgaagaaaatggtggagaaccttgctttctcagctattcttagcaataagaaacaatataatcctgatttttacaattggaatagagtgaaagttagatactgtgacggggcatcattcacaggagatgtagaagcagtgaaccctgctactaatcttcacttcagaggtgctcgagtttggttagccgttatgcaagagctgctagctaaaggcatgataaacgccgagaatgctgttttgtctggctgttctgctggcgggttagcttcgctgatgcattgtgatagtttccgtgctctattaccgatgggaaccaaagtaaaatgtctttcagatgctggtttttttctcaacacaagagacgtctcaggagttcaatacattaaaacatacttcgaagatgttgttactcttcatggatcagcaaagaacttgccgaggtcatgcacatcaagattaactcctgcaatgtgtttctttccgcaatatgtggctcgccagattagaactcctctgttcattcttaatgccgcttatgactcttggcagataaagaacattttggctccgcgagcagctgatccttacggaaaatggcaaagttgtcaactagacatcaagaattgccatccaagtcagatcaaagttatgcaagatttcaggttagagttcttgagtgcagtgataggtttagggagatcttcatcaagagggatgttcatagattcttgctacactcactgccaaaccgagacacaaacttcatggttctggcaagattctccaattctaaaccgaacgacaatagcaaaagctgttggagattgggtttatgacagaacattgtttcagaagatagattgtccttacccttgtaaccctacttgccaccacagggttttcactcctctagatgctcctccaatttaa

SEQ ID NO: 110 - protein, 397 aa, Arabidopsis thaliana
MFKLKQWLIYLVCSLVIMNTEGLFVNITFVRNAVAKGAVCLDGSPPAYHLDRGSGTGINSWLIQLEGGGWCNNVTNCVSRMHTRLGSSKKMVENLAFSAILSNKKQYNPDFYNWNRVKVRYCDGASFTGDVEAVNPATNLHFRGARVWLAVMQELLAKGMINAENAVLSGCSAGGLASLMHCDSFRALLPMGTKVKCLSDAGFFLNTRDVSGVQYIKTYFEDVVTLHGSAKNLPRSCTSRLTPAMCFFPQYVARQIRTPLFILNAAYDSWQIKNILAPRAADPYGKWQSCQLDIKNCHPSQIKVMQDFRLEFLSAVIGLGRSSSRGMFIDSCYTHCQTETQTSWFWQDSPILNRTTIAKAVGDWVYDRTLFQKIDCPYPCNPTCHHRVFTPLDAPPI

SEQ ID NO: 111 - DNA, 1248 bp, Arabidopsis thaliana
atgaagacgacgactcggctcctcgatctaacagcggctatggttctagttgtctacgtgtctttctctcctccgcttgtttccggcgaaccagggcggcgtgttagcatgacactggttcgagacgccgctgctctcggtgctttttgcttggacggaagcttaccggcgtatcatttagacagagggtttggtgctggatcaaacaattggattttgcagtttgagggaggaggatggtgcaatgatatagcatcatgtgtggaaagagccaagacccgtcgaggctcgacacgttatatgagcaagaccgtcgtcttcactggagtcttgagcaataacgcctctcaaaatccagatttttacaactggaacaaagtcaggctaaggtattgcgacggagcttcatttgcgggagattcacaatttggcaacgggacgtcattgctttatttcagaggacaacgaatatggaatgccattattcttgaccttctccccaaaggtttagcaaaagcccacaaggctcttctaaccggttgttcagctggtggtttgtctacatttttgcattgtgacaatttcacgagctatttacccaaaaacgcaagcgttaagtgcatgagcgatgctggattctttcttgacgcaatcgatgtagcagcaaaccggacaatgagatctttttactcacagcttgtgtctctacagggtatacaaaaaaacctcgatccaagttgcacacacgcatttttccccgaaccatctctgtgttttttcccgcaatacgtattgcgatttatcaaaacgccatttttcatcttaaattcagcctacgatgtatttcagttccatcatggactggttccaccttctgctgatcaaaccggacgttggaaccgttgtaagcttaatgtgacggcatgtaatccacaccaactcgatgcactacaagggtttaggaaagatatgttgggagctttaatgaatttcttcagaaattctacgagaggaggaatgtttataaactcatgctttgatcattgtcaaagtgctttagaggagacttggctctctcccacatcaccaagaatcaacaataagacaattgctgagacggtcggagattggtattttgggagaggagaagaagcgaaagaaattggttgtccatatccatgtgataaaacatgtcataatctcattccagcttctacttcagattttttggtaaatctagatatttaa

SEQ ID NO: 112 - protein, 415 aa, Arabidopsis thaliana
MKTTTRLLDLTAAMVLVVYVSFSPPLVSGEPGRRVSMTLVRDAAALGAFCLDGSLPAYHLDRGFGAGSNNWILQFEGGGWCNDIASCVERAKTRRGSTRYMSKTVVFTGVLSNNASQNPDFYNWNKVRLRYCDGASFAGDSQFGNGTSLLYFRGQRIWNAIILDLLPKGLAKAHKALLTGCSAGGLSTFLHCDNFTSYLPKNASVKCMSDAGFFLDAIDVAANRTMRSFYSQLVSLQGIQKNLDPSCTHAFFPEPSLCFFPQYVLRFIKTPFFILNSAYDVFQFHHGLVPPSADQTGRWNRCKLNVTACNPHQLDALQGFRKDMLGALMNFFRNSTRGGMFINSCFDHCQSALEETWLSPTSPRINNKTIAETVGDWYFGRGEEAKEIGCPYPCDKTCHNLIPASTSDFLVNLDI

SEQ ID NO: 113 - DNA, 1176 bp, Arabidopsis thaliana
atgacgtggctaaaacaaatgtggtcaagcattttagtgctagccgtggtggtgatcggagccagagctgtgcccatcacgtatcttgaatctgcagtggctaaaggagctgtgtgtttggatggtagcgcgccagcataccatttcgataagggatcgggctcaggagtgaacaattggatcgttcatatggaaggaggaggatggtgcactgatatagctacatgcgttcaacgtaaaagtacaatgaagggttcttctaagcttatgaacaaagactttggtttctccggtatcttgggtggcaagcaaagcaccaatccagacttttacaattggaatagaatcaaagttcggtattgcgatggttcatctttcaccggtgatatagaagctgttgatccgacgcacaagctgttctttcgcggtgctagggtttggcgtgcggtgatcgatgatcttatggctaagggaatgagcaacgctcaaaacgctatactctccggttgttcagctggagcattggctgcgattctacattgcgaccagttcaagtccactctccctaaaacggctaaggtcaaatgtgtttctgacgctggttacttcatccacggtaaggatatcactggaggatcttacatccaatcctactacgccaaagtcgtagcgacccacggatctgcaaagagtctacctgcttcttgcacctcaagtatgaagcctgatttgtgtttcttccctcaatacgttgctaagaccttacaaacaccgcttttcgtcatcaatgccgccttcgattcttggcagatcaagaatgtattggcaccaacctctgttgataaaagcaaagcatggaagacttgtaagcttgatcttaagaagtgtacggccgctcagcttcaaaccgttcaaggatatagagaccaagtgttggctgcgttggcgcctgttcgatccgcgacgacgaacggattgttcttggactcgtgccatgctcattgccaaggtggaagcgctgccacttggtccggcgacaaaggtcccacagtcgcgaatacgaaaatggctaaggcggttggagattggttctttgagaggagtacgtttcagaacgtagattgttcatcgcttaattgcaaccctacttgccctgcagtatctactgaagactaa

SEQ ID NO: 114 - protein, 391 aa, Arabidopsis thaliana
MTWLKQMWSSILVLAVVVIGARAVPITYLESAVAKGAVCLDGSAPAYHFDKGSGSGVNNWIVHMEGGGWCTDIATCVQRKSTMKGSSKLMNKDFGFSGILGGKQSTNPDFYNWNRIKVRYCDGSSFTGDIEAVDPTHKLFFRGARVWRAVIDDLMAKGMSNAQNAILSGCSAGALAAILHCDQFKSTLPKTAKVKCVSDAGYFIHGKDITGGSYIQSYYAKVVATHGSAKSLPASCTSSMKPDLCFFPQYVAKTLQTPLFVINAAFDSWQIKNVLAPTSVDKSKAWKTCKLDLKKCTAAQLQTVQGYRDQVLAALAPVRSATTNGLFLDSCHAHCQGGSAATWSGDKGPTVANTKMAKAVGDWFFERSTFQNVDCSSLNCNPTCPAVSTED

SEQ ID NO: 115 - DNA, 1248 bp, Arabidopsis thaliana
atggtgaagcttttgttagtagggtttgttgtggctggtataatactgggaactcaagcaaatgaatatttagatttcaatgtgacagaaatagatcgcattgaggaattagagtttggattttccaaatatagctccaatttgaaccctttaatggttggtctcacccttatcagaggagctgattctggagctgtttgtttggatggaacattgcctggatatcacttgcaccgtggacatggatctggagctaatagctggctcattcaattggagggaggaggatggtgcaacaacatcaggacctgtgtatacaggaagactactcgacgtggttcctctaattatatggagaaacagcttcagtttacaggaatactgagtgacaaagctcaagaaaatcctgactttttcaactggaatagagttaagcttcgttactgcgatggcgcttctttcagtggagatggccagaatcaggctgcacaacttcagtttagaggagagcgtatctggagagccgcaatagatgatttgaaggcgaatggaatgcgatacgccaatcaggcacttctctccggatgctctgctggtggtttagcagcaatcttgcgctgcgatgagtttaggaacttattccctggatcaaccaaagtcaagtgcttgagtgatgcaggcttgttcttggacactgccgatgtttcaggcggccgcacaatcaggaacttatacaatggtgtcgtagaattgcagagtgtgaagaacaatcttccacgtatatgcacaaaccatcttgatccaacctcgtgtttcttcccacaaaatctgatcagtcaaatgaaaactccactttttatcgtcaacgcagcatatgatacatggcagattcaaagcagtatagctccaacatcagctgatcctagtggattttggcatgactgcagactaaaccatggaaaatgtactcctgcacagttgagattcttgcaaggattcagggaacagatgcttagagtagtcaagggcttctcaatgtctagacagaatggattgttcatcaattcttgctttgctcactgccaaaccgagagacaagatacttggtttgccgatgattctcctgttatcaggaaaaaggcggtggcaatagctgtaggagattggtatttcgatagagcggaagtgaagttagtcgattgcccatacccgtgtgacaagagctgccacaacttggtgttcagatga

SEQ ID NO: 116 - protein, 415 aa, Arabidopsis thaliana
MVKLLLVGFVVAGIILGTQANEYLDFNVTEIDRIEELEFGFSKYSSNLNPLMVGLTLIRGADSGAVCLDGTLPGYHLHRGHGSGANSWLIQLEGGGWCNNIRTCVYRKTTRRGSSNYMEKQLQFTGILSDKAQENPDFFNWNRVKLRYCDGASFSGDGQNQAAQLQFRGERIWRAAIDDLKANGMRYANQALLSGCSAGGLAAILRCDEFRNLFPGSTKVKCLSDAGLFLDTADVSGGRTIRNLYNGVVELQSVKNNLPRICTNHLDPTSCFFPQNLISQMKTPLFIVNAAYDTWQIQSSIAPTSADPSGFWHDCRLNHGKCTPAQLRFLQGFREQMLRVVKGFSMSRQNGLFINSCFAHCQTERQDTWFADDSPVIRKKAVAIAVGDWYFDRAEVKLVDCPYPCDKSCHNLVFR

SEQ ID NO: 117 - DNA, 1176 bp, Arabidopsis thaliana
atggggaggcttaagcaatgttggtcaagtctgctagtattggcagtgttggtgatcggaactggagccgttcccatcacttatctccaaagcgccgtcgctaaaggagccgtgtgtttggatgggagtgcaccagcttaccattttgacaaagggtttggttcgggtgttaacaattggatcgtccacatggagggaggaggatggtgtaccgacgttgcttcatgtaatgaacgtaagggtacaatgaagggttcttccaaattcatgaacaaagactttggattttccggtatcttgggtggcaagcaaagcactaacccagatttctacaattggaacagaatcaaagtacgatattgtgacggatcatcctttaccggcaatgtagaagccgttaatccggcaaacaagctgttcttccgcggtgcccgagtttggcgtgcggtggttgatgatcttatggctaaaggaatgaaaaacgctcaaaacgctatactctccggttgttcagctggagcattggctgcgattcttcattgtgacactttccgtgccatacttccccgaacagctagcgtcaaatgtgtttctgatgccggttactttatccacggtaaagatatcacaggaggatcatacattcaatcatattacagcaaagtcgtcgcactccacggatctgcaaagagtcttcctgtttcttgtacctcaaaaatgaaaccagaactctgtttcttcccgcaatacgtcgttccttccatgcgaacaccgctctttgtcatcaatgccgcttttgattcttggcagatcaagaacgttttggctccaactgctgttgataagggaaaagagtggaagaattgtaagcttgatcttaagaaatgtagtgccgctcagctcaaaaccgtccaagggtttagagatcagatgatgcgagcattgtcaccggttcacagtacaccgtctagaggattgttcttagactcgtgtcacgctcattgccaaggaggaagcgccgcctcttggtccggtgacaaaggtccccaagtcgccaatacgagaattgcgaaagcagtcggaaactggttttatggccggagtgcatttcagaagatagattgtccgtcgccgacttgtaatcctacttgtcctgctatctctactgaagactag

SEQ ID NO: 118 - protein, 391 aa, Arabidopsis thaliana
MGRLKQCWSSLLVLAVLVIGTGAVPITYLQSAVAKGAVCLDGSAPAYHFDKGFGSGVNNWIVHMEGGGWCTDVASCNERKGTMKGSSKFMNKDFGFSGILGGKQSTNPDFYNWNRIKVRYCDGSSFTGNVEAVNPANKLFFRGARVWRAVVDDLMAKGMKNAQNAILSGCSAGALAAILHCDTFRAILPRTASVKCVSDAGYFIHGKDITGGSYIQSYYSKVVALHGSAKSLPVSCTSKMKPELCFFPQYVVPSMRTPLFVINAAFDSWQIKNVLAPTAVDKGKEWKNCKLDLKKCSAAQLKTVQGFRDQMMRALSPVHSTPSRGLFLDSCHAHCQGGSAASWSGDKGPQVANTRIAKAVGNWFYGRSAFQKIDCPSPTCNPTCPAISTED

SEQ ID NO: 119 - DNA, 1251 bp, Arabidopsis thaliana
atgaggaagcttttcttgttagggtttatagttgcaggactggttcttgggaatgaggcaaatgggtatttagagttcaatgtcactgaattagatcgcattgaggatttagagtttggtttctccaaatttagttccaatttcaatccattaatggttggtctcacacttatcagaggagctggttctaaaggagctgtttgtttggatggtacattgcctggatatcacttacatcgtggacatggatctggagccaatagctggttaattcaattagagggaggaggatggtgtgacaacattaggaactgtgtataccgaaagaagtcgcgtcgcggatcttctaactatatggagaaacaaatacagtttacaggaatacttagcaataaagctcaagaaaatccagactttttcaactggaatcgagttaagcttcgttactgcgatggtggttccttcagtggagatagtcagaacaaggctgcacggcttcagtttagaggagagaagatatggagagccgcaatggacgatttgaaggcaaagggaatgcgaaatgcgaaacaggcacttctatctggttgctctgcaggtggtctagcagttattttacgctgtgacgaattcagaaacttgttttctggatggaccagagttaaatgcttaagtgatgcaggcttgttcttggacacgcctgatgtatccggtggacacactataaggaatttatataacggcgttgtgcagttgcagggagtgaagaacaatttgccacatttatgcactaaccatctcaatccaacctcttgtttcttccctcaaaacttgatcagtcagatgaaaactcctcttttcattgtcaatgcagcatatgatatttggcagattcaaagcagtatcgctccgccgagtgcagatcctagtggttattggcatgaatgcagattaaaccacggtagatgcactccggcgcagatacggttcttgcaagggtttagaaaccaaatgttgagagctgtgagtggtttctcgaattcgaaaaagaacggtttgttcatcaattcttgctttgctcattgccaaaccgaaaggcaagacacttggttcgccgatgattctcctgttatacacaaaaaggcggtggcgatagcggttggagattggtatttcgatagagctgaagtgaagctaatagattgtccatacccgtgtgataggagctgtcacaatctggtcttcagatga

SEQ ID NO: 120 - protein, 416 aa, Arabidopsis thaliana
MRKLFLLGFIVAGLVLGNEANGYLEFNVTELDRIEDLEFGFSKFSSNFNPLMVGLTLIRGAGSKGAVCLDGTLPGYHLHRGHGSGANSWLIQLEGGGWCDNIRNCVYRKKSRRGSSNYMEKQIQFTGILSNKAQENPDFFNWNRVKLRYCDGGSFSGDSQNKAARLQFRGEKIWRAAMDDLKAKGMRNAKQALLSGCSAGGLAVILRCDEFRNLFSGWTRVKCLSDAGLFLDTPDVSGGHTIRNLYNGVVQLQGVKNNLPHLCTNHLNPTSCFFPQNLISQMKTPLFIVNAAYDIWQIQSSIAPPSADPSGYWHECRLNHGRCTPAQIRFLQGFRNQMLRAVSGFSNSKKNGLFINSCFAHCQTERQDTWFADDSPVIHKKAVAIAVGDWYFDRAEVKLIDCPYPCDRSCHNLVFR

SEQ ID NO: 121 - DNA, 1113 bp, Arabidopsis thaliana
atgacgtggctaaaacaaatgtggtcaagcattttagtgctagccgtggtggtgatcggagccagagctgtgcccatcacgtatcttgaatctgcagtggctaaaggagctgtgtgtttggatggtagcgcgccagcataccatttcgataagggatcgggctcaggagtgaacaattggatcgttcatatggaaggaggaggatggtgcactgatatagctacatgcgttcaacgtaaaagtacaatgaagggttcttctaagcttatgaacaaagactttggtttctccggtatcttgggtggcaagcaaagcaccaatccagacttttacaattggaatagaatcaaagttcggtattgcgatggttcatctttcaccggtgatatagaagctgttgatccgacgcacaagctgttctttcgcggtgctagggtttggcgtgcggtgatcgatgatcttatggctaagggaatgagcaacgctcaaaacgctatactctccggttgttcagctggagcattggctgcgattctacattgcgaccagttcaagtccactctccctaaaacggctaaggtcaaatgtgtttctgacgctggttacttcatccacggtaaggatatcactggaggatcttacatccaatcctactacgccaaagtcgtagcgacccacggatctgcaaagagtctacctgcttcttgcacctcaagtatgaagcctgatttgtgtttcttccctcaatacgttgctaagaccttacaaacaccgcttttcgtcatcaatgccgccttcgattcttggcagatcaagaatgtattggcaccaacctctgttgataaaagcaaagcatggaagacttgtaagcttgatcttaagaagtgtacggccgctcagcttcaaaccgttcaagagaccaagtgttggctgcgttggcgcctgttcgatccgcgacgacgaacggattgttcttggactcgtgccatgctcattgccaaggtggaagcgctgccacttggtccggcgacaaaggtcccacagtcgcgaatacgaaaatggctaaggcggttggagattggttctttgagaggagtacgtttcagaacgtag

SEQ ID NO: 122 - protein, 370 aa, Arabidopsis thaliana
MTWLKQMWSSILVLAVVVIGARAVPITYLESAVAKGAVCLDGSAPAYHFDKGSGSGVNNWIVHMEGGGWCTDIATCVQRKSTMKGSSKLMNKDFGFSGILGGKQSTNPDFYNWNRIKVRYCDGSSFTGDIEAVDPTHKLFFRGARVWRAVIDDLMAKGMSNAQNAILSGCSAGALAAILHCDQFKSTLPKTAKVKCVSDAGYFIHGKDITGGSYIQSYYAKVVATHGSAKSLPASCTSSMKPDLCFFPQYVAKTLQTPLFVINAAFDSWQIKNVLAPTSVDKSKAWKTCKLDLKKCTAAQLQTVQETKCWLRWRLFDPRRRTDCSWTRAMLIAKVEALPLGPATKVPQSRIRKWLRRLEIGSLRGVRFRT

SEQ ID NO: 123 - DNA, 1191 bp, Arabidopsis thaliana
atggcgattccaaggtttagctctctgttacggtgtagaaaatgggctaaaagtgactggcttgtcgcttctataggatgcgtattgatcgtttttttcctctctttcttcttcgatcccacttcagactctgtcccctccgttgaccgatctcggccaatcatatctcctagcgatctggtcaagctgaagttgtcgagtgtagctaaagagagaggagctttttgtttggatggaagcttgcctgggtaccactttcatgagggttctggatctggctcccaaagctggcttgttcatttggagggtggaggctggtgcaacacagttgcgtcatgttctgctcgagcattgactaaattaggttcttccaactactttgaacaagaagtggcctttcaaggtgttttaagtagtgacccatctcaaaatcctgaattctttaactggaacaaggttgcgataaggtactgtgatggtgcttctttttctggacgccctgaagctgaattcaagaatggcacacggcttttcttccggggccagcttatttgggaggctattattgatgaacttttgtcaatgggcatgtcagatgccaaacaggccatacttacaggatgttctgccggtggcttggcaagtcttatacattgtgactactttcgagatcatcttccaaaagatgcagctgtcaaatgtgtttctgatggaggctactttctcaacgtgcctgatgtccttggaaacccaacaatgaggtctttctatcatgatgttgttaatttgcagggcgtagagaagagcttggatcagaaatgtgtagccaaaacggagccatctaagtgtatgtttcctcaagaattcctgaaaaacataagaactccggtatttcttgtcaatccagcctacgatttttggcagattcaacatgtcttggtaccaacttctgcggatccagataaaagttgggcaaagtgcagactcaatattaaggaatgtgatgccgaacagattaaagttctacacggttttcgcagttctatgatgactgcaattggggaatttcatcagaacaaagatggtgggatgttcatagattcctgctatgctcattgccagacagtcatgtccgtgacatggcactccctgacctcaccaagaatcgaaaataaggtaaaagatatttaa

SEQ ID NO: 124 - protein, 396 aa, Arabidopsis thaliana
MAIPRFSSLLRCRKWAKSDWLVASIGCVLIVFFLSFFFDPTSDSVPSVDRSRPIISPSDLVKLKLSSVAKERGAFCLDGSLPGYHFHEGSGSGSQSWLVHLEGGGWCNTVASCSARALTKLGSSNYFEQEVAFQGVLSSDPSQNPEFFNWNKVAIRYCDGASFSGRPEAEFKNGTRLFFRGQLIWEAIIDELLSMGMSDAKQAILTGCSAGGLASLIHCDYFRDHLPKDAAVKCVSDGGYFLNVPDVLGNPTMRSFYHDVVNLQGVEKSLDQKCVAKTEPSKCMFPQEFLKNIRTPVFLVNPAYDFWQIQHVLVPTSADPDKSWAKCRLNIKECDAEQIKVLHGFRSSMMTAIGEFHQNKDGGMFIDSCYAHCQTVMSVTWHSLTSPRIENKVKDI

SEQ ID NO: 125 - DNA, 1098 bp, Arabidopsis thaliana
atgtcttttggttttgcagtttgtttagatggaagtccaccagcttatcatttggatagaggttctggaactggaatcaatagttggttgatacagcttgagggaggaggatggtgcaataatgtaacaaattgcgttagtcggatgcatactcgattaggttcatcgaagaaaatggtggagaaccttgctttctcagctattcttagcaataagaaacaatataatcctgatttttacaattggaatagagtgaaagttagatactgtgacggggcatcattcacaggagatgtagaagcagtgaaccctgctactaatcttcacttcagaggtgctcgagtttggttagccgttatgcaagagctgctagctaaaggcatgataaacgccgagaatgctgttttgtctggctgttctgctggcgggttagcttcgctgatgcattgtgatagtttccgtgctctattaccgatgggaaccaaagtaaaatgtctttcagatgctggtttttttctcaacacaagagacgtctcaggagttcaatacattaaaacatacttcgaagatgttgttactcttcatggatcagcaaagaacttgccgaggtcatgcacatcaagattaactcctgcaatgtgtttctttccgcaatatgtggctcgccagattagaactcctctgttcattcttaatgccgcttatgactcttggcagataaagaacattttggctccgcgagcagctgatccttacggaaaatggcaaagttgtcaactagacatcaagaattgccatccaagtcagatcaaagttatgcaagatttcaggttagagttcttgagtgcagtgataggtttagggagatcttcatcaagagggatgttcatagattcttgctacactcactgccaaaccgagacacaaacttcatggttctggcaagattctccaattctaaaccgaacgacaatagcaaaagctgttggagattgggtttatgacagaacattgtttcagaagatagattgtccttacccttgtaaccctacttgccaccacagggttttcactcctctagatgctcctccaatttaa

SEQ ID NO: 126 - protein, 365 aa, Arabidopsis thaliana
MSFGFAVCLDGSPPAYHLDRGSGTGINSWLIQLEGGGWCNNVTNCVSRMHTRLGSSKKMVENLAFSAILSNKKQYNPDFYNWNRVKVRYCDGASFTGDVEAVNPATNLHFRGARVWLAVMQELLAKGMINAENAVLSGCSAGGLASLMHCDSFRALLPMGTKVKCLSDAGFFLNTRDVSGVQYIKTYFEDVVTLHGSAKNLPRSCTSRLTPAMCFFPQYVARQIRTPLFILNAAYDSWQIKNILAPRAADPYGKWQSCQLDIKNCHPSQIKVMQDFRLEFLSAVIGLGRSSSRGMFIDSCYTHCQTETQTSWFWQDSPILNRTTIAKAVGDWVYDRTLFQKIDCPYPCNPTCHHRVFTPLDAPPI

SEQ ID NO: 127 - DNA, 1311 bp, Arabidopsis thaliana
atgaagacgacgactcggctcctcgatctaacagcggctatggttctagttgtctacgtgtctttctctcctccgcttgtttccggcgaaccagggcggcgtgttagcatgacactggttcgagacgccgctgctctcggtgctttttgcttggacggaagcttaccggcgtatcatttagacagagggtttggtgctggatcaaacaattggattttgcagtttgagggaggaggatggtgcaatgatatagcatcatgtgtggaaagagccaagacccgtcgaggctcgacacgttatatgagcaagaccgtcgtcttcactggagtcttgagcaataacgcctctcaaaatccagatttttacaactggaacaaagtcaggctaaggtattgcgacggagcttcatttgcgggagattcacaatttggcaacgggacgtcattgctttatttcagaggacaacgaatatggaatgccattattcttgaccttctccccaaaggtttagcaaaagcccacaaggctcttctaaccggttgttcagctggtggtttgtctacatttttgcattgtgacaatttcacgagctatttacccaaaaacgcaagcgttaagtgcatgagcgatgctggattctttcttgacgcaatcgatgtagcagcaaaccggacaatgagatctttttactcacagcttgtgtctctacagggtatacaaaaaaacctcgatccaagttgcacacacgcatttttccccgaaccatctctgtgttttttcccgcaatacgtattgcgatttatcaaaacgccatttttcatcttaaattcagcctacgatgtatttcagttccatcatggactggttccaccttctgctgatcaaaccggacgttggaaccgttgtaagcttaatgtgacggcatgtaatccacaccaactcgatgcactacaagggtttaggaaagatatgttgggagctttaatgaatttcttcagaaattctacgagaggaggaatgtttataaactcatgctttgatcattgtcaaagtgctttagaggagacttggctctctcccacatcaccaagaatcaacaataagacaattgctgagacggtcggagattggtattttgggagaggagaagaagcgaaagaaattggttgtccatatccatgtgataaaacatgtcataatctcattccagcttctacttcagattttttggcttctaatgcttcaggttcaggccataactctcgcggtaccttgactcgaagccaagttgatctaaatgatcttatgtag

SEQ ID NO: 128 - protein, 436 aa, Arabidopsis thaliana
MKTTTRLLDLTAAMVLVVYVSFSPPLVSGEPGRRVSMTLVRDAAALGAFCLDGSLPAYHLDRGFGAGSNNWILQFEGGGWCNDIASCVERAKTRRGSTRYMSKTVVFTGVLSNNASQNPDFYNWNKVRLRYCDGASFAGDSQFGNGTSLLYFRGQRIWNAIILDLLPKGLAKAHKALLTGCSAGGLSTFLHCDNFTSYLPKNASVKCMSDAGFFLDAIDVAANRTMRSFYSQLVSLQGIQKNLDPSCTHAFFPEPSLCFFPQYVLRFIKTPFFILNSAYDVFQFHHGLVPPSADQTGRWNRCKLNVTACNPHQLDALQGFRKDMLGALMNFFRNSTRGGMFINSCFDHCQSALEETWLSPTSPRINNKTIAETVGDWYFGRGEEAKEIGCPYPCDKTCHNLIPASTSDFLASNASGSGHNSRGTLTRSQVDLNDLM

SEQ ID NO: 129 - DNA, 1356 bp, Arabidopsis thaliana
atgaagacgacgactcggctcctcgatctaacagcggctatggttctagttgtctacgtgtctttctctcctccgcttgtttccggcgaaccagggcggcgtgttagcatgacactggttcgagacgccgctgctctcggtgctttttgcttggacggaagcttaccggcgtatcatttagacagagggtttggtgctggatcaaacaattggattttgcagtttgagggaggaggatggtgcaatgatatagcatcatgtgtggaaagagccaagacccgtcgaggctcgacacgttatatgagcaagaccgtcgtcttcactggagtcttgagcaataacgcctctcaaaatccagatttttacaactggaacaaagtcaggctaaggtattgcgacggagcttcatttgcgggagattcacaatttggcaacgggacgtcattgctttatttcagaggacaacgaatatggaatgccattattcttgaccttctccccaaaggtttagcaaaagcccacaaggctcttctaaccggttgttcagctggtggtttgtctacatttttgcattgtgacaatttcacgagctatttacccaaaaacgcaagcgttaagtgcatgagcgatgctggattctttcttgacgcaatcgatgtagcagcaaaccggacaatgagatctttttactcacagcttgtgtctctacagggtatacaaaaaaacctcgatccaagttgcacacacgcatttttccccgaaccatctctgtgttttttcccgcaatacgtattgcgatttatcaaaacgccatttttcatcttaaattcagcctacgatgtatttcagttccatcatggactggttccaccttctgctgatcaaaccggacgttggaaccgttgtaagcttaatgtgacggcatgtaatccacaccaactcgatgcactacaagggtttaggaaagatatgttgggagctttaatgaatttcttcagaaattctacgagaggaggaatgtttataaactcatgctttgatcattgtcaaagtgctttagaggagacttggctctctcccacatcaccaagaatcaacaataagacaattgctgagacggtcggagattggtattttgggagaggagaagaagcgaaagaaattggttgtccatatccatgtgataaaacatgtcataatctcattccagcttctacttcagattttttggcttctaatgcttcaggttcaggccataactctcgcggtacacacttgacttttctttttcttcttcttaactttttcttcttctttgtaattagtaaatttagtaaaaaagattatgttacgtag

SEQ ID NO: 130 - protein, 451 aa, Arabidopsis thaliana
MKTTTRLLDLTAAMVLVVYVSFSPPLVSGEPGRRVSMTLVRDAAALGAFCLDGSLPAYHLDRGFGAGSNNWILQFEGGGWCNDIASCVERAKTRRGSTRYMSKTVVFTGVLSNNASQNPDFYNWNKVRLRYCDGASFAGDSQFGNGTSLLYFRGQRIWNAIILDLLPKGLAKAHKALLTGCSAGGLSTFLHCDNFTSYLPKNASVKCMSDAGFFLDAIDVAANRTMRSFYSQLVSLQGIQKNLDPSCTHAFFPEPSLCFFPQYVLRFIKTPFFILNSAYDVFQFHHGLVPPSADQTGRWNRCKLNVTACNPHQLDALQGFRKDMLGALMNFFRNSTRGGMFINSCFDHCQSALEETWLSPTSPRINNKTIAETVGDWYFGRGEEAKEIGCPYPCDKTCHNLIPASTSDFLASNASGSGHNSRGTHLTFLFLLLNFFFFFVISKFSKKDYVT

SEQ ID NO: 131 - DNA, 1104 bp, Physcomitrella patens subsp. patens
atgtgcgcagtatgcttggatggctctccaccgggttatcatctacacgaagggaatggggggaacgccaggaattgggttttgtttttggaggaaggagcgtggtgtgaaagtgaagcagcatgcaaggttcgagctcgagctcacttgggatcttccaagtggatgaatgatcggacttttgaaggaattttaagcaactcagaggaggtcaatccagatttttacaactggaatcgtgtatttgtgaggtactgcgatggtgcttcttttagtggcaattccagcttgcccactaaaaccgagggaaatgccttgcactacagaggcgaaagtatttggaactttgttattgatgacctcttgaagaaaggcttgaacaaagttgagaaggctctgcttggtggttgttcagcaggcggcttatcctccatccttcattgtgacaaattgagaacagttttgccgcgtgccaaggtcgtgaaatgcatgagtgatgcaggtttctttgttgacatgtacgttctcgcatactatgtcttcatgattattatggttggatggcagaatgtcagtggcacgctgccggaatactgtacggagacacggaattcagttgagtgtttctttccacaatatttgatatcggaaatgaagactccacttttcgtcgtcaatggtgcctacgattggtggcagatggacaacattgtcgctccagatccactcggtgaatgggatgactgcaaaaataatgctattagctgcacgaacgcgcagctggagattattcaaggctacaggaaagagttgctagaagctctgaagccaatacagaacagcaagaagcatggaatgtttgttgacggttgctttcatcactgtcaagcttcatatgatgcgttttggagtggcccgcatgcacctcatgtgaagggaaagactgcatcgcaagctttgggtgactggtacttcgagcgtgatacaacagcgagctcagttatcgattgcgcgtatccgtgtaatccaacttgtcctccaaaaaccagtggccgtctaagtgtgggcaggcccagcttccgaaactggagtaagcgccagtga

SEQ ID NO: 132 - protein, 367 aa, Physcomitrella patens subsp. patens
MCAVCLDGSPPGYHLHEGNGGNARNWVLFLEEGAWCESEAACKVRARAHLGSSKWMNDRTFEGILSNSEEVNPDFYNWNRVFVRYCDGASFSGNSSLPTKTEGNALHYRGESIWNFVIDDLLKKGLNKVEKALLGGCSAGGLSSILHCDKLRTVLPRAKVVKCMSDAGFFVDMYVLAYYVFMIIMVGWQNVSGTLPEYCTETRNSVECFFPQYLISEMKTPLFVVNGAYDWWQMDNIVAPDPLGEWDDCKNNAISCTNAQLEIIQGYRKELLEALKPIQNSKKHGMFVDGCFHHCQASYDAFWSGPHAPHVKGKTASQALGDWYFERDTTASSVIDCAYPCNPTCPPKTSGRLSVGRPSFRNWSKRQ

SEQ ID NO: 133 - DNA, 1182 bp, Vitis vinifera
atggcgaaccctaggcttcgacttctccttccttggaggaaattctccaaaagagactgggcaatcgcagccttcggattcaccatcttcttcttcgctctctctttcacctccaccaaaaccatcgcacccctggatttggttgacttgacgttggtgcgccatgccaaggataaaggcgccgtttgtttagatggtagtgcccctggatatcattttcgaagtggttttggatctggctctaacaattgggttcttcatatagagggtggaggctggtgtaatactgtagcatcttgtttaattcgtaaaacaactgcactaggttcttcaaactacatggaacgtcaagttcgcttttccggaattttaagccatgactcatcacagaatcctgatttctttgactggaataaagtcaagctgcggtattgtgatggtgcttcttttgctggaaactctcaaaagaatgaaacacaactcttcttcagaggtcagcgcatctgggaagcagttatggatgaactcttatcaataggactgtctaatgctaaacaggttcttctttcagggtgctctgctggaggattggcaactctcatacactgtgatgacttccgggggattttgccaaaggatgccactgtcaaatgccttgctgatgcaggttttttccttgatgagaaagatgttactggaaatcgcagaataaggtctttctatagtgatgttgtccaccttcagggtgtagcaaacagtttggataaggattgtgttggaagaatggaaccatcccagtgtttctttcctcaagaatttatcaagaacataaaaaccccagttttccttgtcaacccagcttatgatttttggcagattcaatatgttttgataccagctgaatcagatccttctggcaaatgggcaaaatgcagactgagcattcagaagtgtagtcctgcccagattgaaattctacatggtttccgaaattctatgctaaagacactgagtgagttccaacaaaacaaggatggaggcatgtttataaactcttgctttagtcactgccaaacattgatgactgagacatggcattctccttattctcccaggatcaacaataagaccattgcagaatctgtaggtgactgctcaatgtgtcatcaattttgttgctga

SEQ ID NO: 134 - protein, 393 aa, Vitis vinifera
MANPRLRLLLPWRKFSKRDWAIAAFGFTIFFFALSFTSTKTIAPLDLVDLTLVRHAKDKGAVCLDGSAPGYHFRSGFGSGSNNWVLHIEGGGWCNTVASCLIRKTTALGSSNYMERQVRFSGILSHDSSQNPDFFDWNKVKLRYCDGASFAGNSQKNETQLFFRGQRIWEAVMDELLSIGLSNAKQVLLSGCSAGGLATLIHCDDFRGILPKDATVKCLADAGFFLDEKDVTGNRRIRSFYSDVVHLQGVANSLDKDCVGRMEPSQCFFPQEFIKNIKTPVFLVNPAYDFWQIQYVLIPAESDPSGKWAKCRLSIQKCSPAQIEILHGFRNSMLKTLSEFQQNKDGGMFINSCFSHCQTLMTETWHSPYSPRINNKTIAESVGDCSMCHQFCC

SEQ ID NO: 135 - DNA, 1185 bp, Vitis vinifera
atgagagtggcggcgtacgttagcgcggtcatgctaacgtgcgcgtggtgcgtattgtcggagccgaggctggaggtgccgatgactctggttcggaatgcttctcatcagggagctttttgcttagacgggagcttgccggcgtatcatctgcataaaggattcggagctggagctaccaactggcttttgcagtttgagggaggtgggtggtgcaatgatttagaatcatgcttcgagagagccggtactcgtcgtggatcaactcgttacatgtccaagtttgaggtcttttctggaattttaagcaataatgcatctctaaatccagatttttacaattggaaccgggtgaagctaagatattgtgatggagcctcatttgctggggatgccaagtttgacaatgggacctcaatactctactttagagggcagaagatttggcgagcaataattaatgatcttctccctaaaggattaagcaaagcaaagaaggctttactttcaggttgctctgctggaggtctagcatcttttttgcattgtgacaactttaccagctttctaccacaaaatgccagtgtaaaatgcttgagtgatgctggattttttcttgatgaaaaagacataagcttgaaccactctatgagggccttctatgaagaactcatttccctgcagggggttgaaaagaatctacatgaaaactgcacaagttctctccattatccacatctatgcctcttcccacagtatgctttggaattcattaagacacccttttttatcttaaactcagcatatgatgtgtaccaatttcatcatatattggtgccacctactgctgatttgcatggacgttggaatcgttgcaagctagatcctgcggcatgcaatccaaaccagctaagtattttgcaaggttttaggaaagatatgcttacagctttgaaccaattctatacttattcaagaagaggagggatgtttataaattcatgctttgctcattgccaaagtgagtcacaagacacatggctggcaattgactccccaagggtgaacaataagactatcgcagaagcaattggtgactggtactttagcagaaggataactaaagagattgactgtgcatatccttgtgacaccacttgtcataatcttataccattgccttag

SEQ ID NO: 136 - protein, 394 aa, Vitis vinifera
MRVAAYVSAVMLTCAWCVLSEPRLEVPMTLVRNASHQGAFCLDGSLPAYHLHKGFGAGATNWLLQFEGGGWCNDLESCFERAGTRRGSTRYMSKFEVFSGILSNNASLNPDFYNWNRVKLRYCDGASFAGDAKFDNGTSILYFRGQKIWRAIINDLLPKGLSKAKKALLSGCSAGGLASFLHCDNFTSFLPQNASVKCLSDAGFFLDEKDISLNHSMRAFYEELISLQGVEKNLHENCTSSLHYPHLCLFPQYALEFIKTPFFILNSAYDVYQFHHILVPPTADLHGRWNRCKLDPAACNPNQLSILQGFRKDMLTALNQFYTYSRRGGMFINSCFAHCQSESQDTWLAIDSPRVNNKTIAEAIGDWYFSRRITKEIDCAYPCDTTCHNLIPLP

SEQ ID NO: 137 - DNA, 1566 bp, Vitis vinifera
atggctaaagcaagaacaggccactggttaagcattctggcattttcactgatcttgctcaaaacagaaggcttctatgtgggaattacttatgtggatagtgcagtagcaaaaggagcagtttgcttggatggtagcccacctgcttaccacatggataagggatttggtgcagggattaacaattggttggttcatattgagggaggaggatggtgcaacaatgcctcaacttgccttgctcgtagggacaaccgtttaggttcatcgaagcaaatggtgaagcaaattgctttctctgggattctgagcaacaagcaaaaatttaatccggacttctacaactggaacaagatcaaggttaggtactgcgatggggcctcctttacgggcgatgtagaagcagttgatcctaagactaatcttcactacagaggagcccgggtgtttcttgctgtcattgaggatcttatggcaaaaggaatgaaaaatgctgcaaatgctgttctctctggctgctctgctggtgggctgactgccattctgcattgtgataaatttcgcgctcttctccctgtcagcaccaaagtaaaatgctttgcagatgccggttacttcatcaacgctaaggatgtttcaggagcagcacacattgaaggcttctacagtgaagtggttgcaacacatggatcagcaaagaatctgcccccatcctgcacttcaagtctaagaccgggcttgtgtttcttcccacaaaacatggctcaacagatcaaaacaccgctttttatcatcaatgcagcctatgattcatggcagataaagaacatcttggcaccgggtgtcgctgatcctcatggtacttggcattactgcaagcttgatatcaaggactgctcatcctcccaacttgaagccatgcaagatttcagggtgcagtttcttagtgcaatcaaaggactgataggctccccctccaaaggaatgttcataaactcctgctatgcccactgccaaaccgaaatgcaggaaacatggctgagggacgactccccagtacttggaaaaacaacaattgcaaaggcagtaggagactggtactatgaccggactttgcagttaatggattggacttttgtacgtaaagcttgggacaagtggatatctaccagtataggttcttctggtgaacccttgaaggcagctttgctaattaactatgacccaactggaccatctcggctattgtccaccattgcagagcaagaagggattagagcaaagccaattgaagtgaatcaatttgttgattttatcaaacgcaacaacctccaaagtgagagcttctttatcgggcaaaaccaatatttggtaacttcaattcatgacggctggttctgtgcaaggtgcatgaacacatcacatcctgctggtgaaggtgctatagttatgcagacaacatcattcatcttggttgcactgtatgatggttccattggttcagcatctcgtgctatggtggatgttgatcagtttgcatggcaattgggcagaaagaacctttaa

SEQ ID NO: 138 - protein, 521 aa, Vitis vinifera
MAKARTGHWLSILAFSLILLKTEGFYVGITYVDSAVAKGAVCLDGSPPAYHMDKGFGAGINNWLVHIEGGGWCNNASTCLARRDNRLGSSKQMVKQIAFSGILSNKQKFNPDFYNWNKIKVRYCDGASFTGDVEAVDPKTNLHYRGARVFLAVIEDLMAKGMKNAANAVLSGCSAGGLTAILHCDKFRALLPVSTKVKCFADAGYFINAKDVSGAAHIEGFYSEVVATHGSAKNLPPSCTSSLRPGLCFFPQNMAQQIKTPLFIINAAYDSWQIKNILAPGVADPHGTWHYCKLDIKDCSSSQLEAMQDFRVQFLSAIKGLIGSPSKGMFINSCYAHCQTEMQETWLRDDSPVLGKTTIAKAVGDWYYDRTLQLMDWTFVRKAWDKWISTSIGSSGEPLKAALLINYDPTGPSRLLSTIAEQEGIRAKPIEVNQFVDFIKRNNLQSESFFIGQNQYLVTSIHDGWFCARCMNTSHPAGEGAIVMQTTSFILVALYDGSIGSASRAMVDVDQFAWQLGRKNL

SEQ ID NO: 139 - DNA, 1269 bp, Vitis vinifera
atggacggggcagatgagagtgggaggcggccaggactgaggctattgtgggtttctggcttgatggggtttcttctctgcaactgggttgatgggtttgagaatttgaatgtgactaaacatcagtttatggacggctatggcttttccacccctccattgatggtgggtctttctcttattgccggagctgcttccactggagcagtatgcctggatggaacattacctggttaccacctccaccggggatatgggtcaggggcaaatagttggctcattcatttggagggtggaggatggtgcaatacaattagaacttgtgttttccggaaaaaaactcctcatggttcatcaacacatatggaaaagctgataccatttacaggaatattgagtaacagagctgaagaaaatcccgatttttataactggaatagagtcaagcttcgatactgtgatggtgcttctttcagtggagacagtcaaaatgaggccaagacattgtatttccggggacaacgcatctggttagctgctatgaaagatctgatgtcaaagggaatgcactatgctaatcaggctcttctttctggatgctcagctgggggcttagcagctatactgcactgtgatgagttcagggaattatttccaagaactactagagtcaagtgtctcagtgatgcagggttatttcttgatgtgattgatgtatctggtgggcgtactttaaggcatatgtttggaggcgtggtcagattacagcaagtggggaaaatgctgccacaggcttgtaccagccacctcaatccaaccttgtgctttttccctcagaacttaattcccctgactaagaccccgctttttcttctcaatgcagcttatgattcatggcagatcctggccagtttagctccgcactcagctgatccccgtggctactggcagaagtgcagattaaattatgcatattgctcttcatcacaaattcaagttctccaagatttcagaaaacaaatgctaaatgctgtaagtggcttctcagggtccaaaagaaatgggctattcataaactcatgttttgctcattgtcagacagagagacaggacacttggtttgctcataattctcctcgtatcggaaacaagggcatcgcccaatctgtgggggactggtattttgatcgagctgaagtcaagagtattgattgtccttatccttgtgacaagacctgccacaatctggtcttccgccaaagtttttag

SEQ ID NO: 140 - protein, 422 aa, Vitis vinifera
MDGADESGRRPGLRLLWVSGLMGFLLCNWVDGFENLNVTKHQFMDGYGFSTPPLMVGLSLIAGAASTGAVCLDGTLPGYHLHRGYGSGANSWLIHLEGGGWCNTIRTCVFRKKTPHGSSTHMEKLIPFTGILSNRAEENPDFYNWNRVKLRYCDGASFSGDSQNEAKTLYFRGQRIWLAAMKDLMSKGMHYANQALLSGCSAGGLAAILHCDEFRELFPRTTRVKCLSDAGLFLDVIDVSGGRTLRHMFGGVVRLQQVGKMLPQACTSHLNPTLCFFPQNLIPLTKTPLFLLNAAYDSWQILASLAPHSADPRGYWQKCRLNYAYCSSSQIQVLQDFRKQMLNAVSGFSGSKRNGLFINSCFAHCQTERQDTWFAHNSPRIGNKGIAQSVGDWYFDRAEVKSIDCPYPCDKTCHNLVFRQSF

SEQ ID NO: 141 - DNA, 1272 bp, Vitis vinifera
atggtgaaggtagtgggtgtggtcgtggccattgttggacttgtttttagcaaatgggtttatggttttgagtttgaagaaaatgggagttgggtacatggtcttgatgatttgaatgtcacagagctctcattctcagtctcttatggagtctctgctgctagcaggcctatgatggtaggcttaacccttattcacgctgctgctgcgaaaggggcagtttgtttagatggaacattaccggggtatcatttgcatcgtggatatgggtcaggggcaaacagttggctcattcaattggaggggggaggatggtgtaatagcattagaacttgtgtttaccgcaagaaaactaggagaggatcatcaatatatatggaaaagcagatcccatttaccggaattctgagcaataatcctgaagaaaatcctgattttttcaactggaatagagtaaagcttcgttattgtgatggtgcctcttttactggtgacagccaaaatcaggctgcacaactgaatttcagaggacagcgtatctggtcagctgctatagaagatttaatgtccaagggaatgcgctatgccaaccaggctcttctttctgggtgctctgctggaggtctggcagctattttgcactgtgatgagtttcgaggcttttttccaagaaatactaaagtgaagtgcctgagtgatgctggattattccttgattcgattgatgtatccggtgggcgcacccttaggaatctcttcagtggtgtagttaacttgcagggggtgcaaaggaacctgccatctttttgtttgaatcgtcttgatccaacctcgtgcttcttcccacagaacgtgatatccaatatcaaaaccccgctatttcttctcaatgcagcctatgattcatggcaggtccaggccagtttagctccaccatcagctgatccccatggctattggaatgaatgcaaaaagaaccatgcccagtgttctccatcacaaattcaattcctgcaaggattcaggaatcaaatgctgaatgcaataaaaggcttctcaatgtctaaacaaaacgggttattcataaattcatgttttgctcactgccagacagagaggcaggatacgtggtttgctgataattctcccattattaaaaacaaggggattgctttagctgttggagactggtacttcgaccgatctggcattaaagccatcgactgcccctacccttgtgacaagacctgccacaatctagtattccgatga

SEQ ID NO: 142 - protein, 423 aa, Vitis vinifera
MVKVVGVVVAIVGLVFSKWVYGFEFEENGSWVHGLDDLNVTELSFSVSYGVSAASRPMMVGLTLIHAAAAKGAVCLDGTLPGYHLHRGYGSGANSWLIQLEGGGWCNSIRTCVYRKKTRRGSSIYMEKQIPFTGILSNNPEENPDFFNWNRVKLRYCDGASFTGDSQNQAAQLNFRGQRIWSAAIEDLMSKGMRYANQALLSGCSAGGLAAILHCDEFRGFFPRNTKVKCLSDAGLFLDSIDVSGGRTLRNLFSGVVNLQGVQRNLPSFCLNRLDPTSCFFPQNVISNIKTPLFLLNAAYDSWQVQASLAPPSADPHGYWNECKKNHAQCSPSQIQFLQGFRNQMLNAIKGFSMSKQNGLFINSCFAHCQTERQDTWFADNSPIIKNKGIALAVGDWYFDRSGIKAIDCPYPCDKTCHNLVFR

SEQ ID NO: 143 - DNA, 1134 bp, Vitis vinifera
atggatttggaggagattccctccccaaatcctctcatggtggacctcactctcattccaggagctgctgctagaggagctgtttgtttggatggaactctacctggttaccatttccatcccggttttggatcaggtgccaacagctggctcattcaattggagggtgggggttggtgtaacaacataaaatcttgtgtttttcgcaaaacaactcgccggggttcatccaaatacatggaaaagacattagccttcacgggaatactaagcaataaagctgaagaaaatcctgattttttcaactggaacagagtcaaacttaggtactgtgatggcgcatcttttagtggggaaggtcaaaataaggccactggactttattttcgaggacaacggatctttgaagctggtatggaggagctaatgtcgaaggggatgaagaatgctgatcaggctcttctttctggatgctctgctgggggactggcgtctatactacattgcgatgagtttggcgatttatttcctaaaactacaaaagtgaaatgcctgagtgatgcagggttcttccttgatgcaaccgatgcagctggtgggcacaccatgaggaatttgtatgctggtgtagttagcttacagggagtagagaagaacctgccaagcacttgtaccacccgtttagatccaacttcgtgcttcttccctgagaacttgatcgacaacattaagactccactctttcttctcaatgcagcctatgatgcatggcagtttcaggaaagtttagttccatcaagtgctgatccccatggtgaatggaagggatgcaaattaaatcatgtcaattgtaattcaacacagatccagtttctccaagatttcaggatggaaatgcttgatgatgtcaaaggttttgcaagggatgatcaaaatgggctcttcataaattcgtgctttgctcactgccagactgagttacaggatacatggtttgctgatgactctccttttcttggaaaaaggaagattgcagagtctgttggagactggtatttcgatcgaagacccgtcaaagccatcgactgtccatacccctgtgacaacacctgccacaacctggtcttcaagtga

SEQ ID NO: 144 - protein, 377 aa, Vitis vinifera
MDLEEIPSPNPLMVDLTLIPGAAARGAVCLDGTLPGYHFHPGFGSGANSWLIQLEGGGWCNNIKSCVFRKTTRRGSSKYMEKTLAFTGILSNKAEENPDFFNWNRVKLRYCDGASFSGEGQNKATGLYFRGQRIFEAGMEELMSKGMKNADQALLSGCSAGGLASILHCDEFGDLFPKTTKVKCLSDAGFFLDATDAAGGHTMRNLYAGVVSLQGVEKNLPSTCTTRLDPTSCFFPENLIDNIKTPLFLLNAAYDAWQFQESLVPSSADPHGEWKGCKLNHVNCNSTQIQFLQDFRMEMLDDVKGFARDDQNGLFINSCFAHCQTELQDTWFADDSPFLGKRKIAESVGDWYFDRRPVKAIDCPYPCDNTCHNLVFK

SEQ ID NO: 145 - DNA, 1218 bp, Vitis vinifera
atggcggtgggggtggtaacagtggcgtggtgtttgttttttatggataggtatgtcttgggggaagatgattttcaaggtttgttggatttggaggagactccctccccaaatcctctcatggtggacctcactctcattccaggagctgctgctaaaggagctgtttgtttggatggaactctacctggttatcatttccatccgggttttggatcaggtgccaacagctggctcattcaattggagggtgggggttggtgtaatgacataaaatcttgtgtttttcgcaaagcaactcgccggggttcatccaaatacatggaaaagacattagccttcacgggaatactaagcaataaagctgaagaaaatcctgattttttcaactggaacagagtcgaacttaggtactgtgatggcgcatcttttagtggggaaggtcaaaatgaggctgctggactttacttccgaggacaacggatctttgaagctggtatggaggagttaatgtcaaaggggatgaagaatgctgatcaggctcttctttctggatgctctgctggggggctggcgtctatactacattgcgatgagtttggcggtttatttcctgaaactacaaaagtgaaatgcctgagtgatgcagggttcttccttgatgtaaccgatgcagctggtgggcacaccataaggaatttttatgctggtgtagttagcttacagggagtagaaaagaacctgccaagcacttgtatcagccgtttcgatccaacttcgtgcttcttccctgagaacttggtcgacaacattaagaccccgctctttctgctcaatgcagcctacgatacatggcagtttcatcaaagtttagttccatcaagtgttgatccccatggtgaatggaatgcatgcaaatcaaatcaatccaattgtaattcaacacagatccagcttctccaagatttcaggatggaaatgcttgatgatgtcaaaagttttgcaagggatgatcagaatggactcttcataaattcgtgctttgttcattgccagactgagagacaggatacatggtttgctgatgactctccccttattggaaaaaagaagattgcagagtctgttggagactggtatttcgatcgaagacccgtcaaagccatcgactgtccatacccctgtgacaccacctgccacaacctggtcttcaagtga

SEQ ID NO: 146 - protein, 405 aa, Vitis vinifera
MAVGVVTVAWCLFFMDRYVLGEDDFQGLLDLEETPSPNPLMVDLTLIPGAAAKGAVCLDGTLPGYHFHPGFGSGANSWLIQLEGGGWCNDIKSCVFRKATRRGSSKYMEKTLAFTGILSNKAEENPDFFNWNRVELRYCDGASFSGEGQNEAAGLYFRGQRIFEAGMEELMSKGMKNADQALLSGCSAGGLASILHCDEFGGLFPETTKVKCLSDAGFFLDVTDAAGGHTIRNFYAGVVSLQGVEKNLPSTCISRFDPTSCFFPENLVDNIKTPLFLLNAAYDTWQFHQSLVPSSVDPHGEWNACKSNQSNCNSTQIQLLQDFRMEMLDDVKSFARDDQNGLFINSCFVHCQTERQDTWFADDSPLIGKKKIAESVGDWYFDRRPVKAIDCPYPCDTTCHNLVFK

SEQ ID NO: 147 - DNA, 1185 bp, Populus trichocarpa
atggatggttcaagtttaggcaagtggctgtgtcttattgttcacatactgacattgctcaagacagaaggagctagcattcccatgactattgtccaggctgctgttgctagaggagctgtttgcttagatgggagtccaccaggataccactttgagaaaggatctggttctgggattaacaattggttggttcacatggagggaggaggatggtgtgagagtgttgagtcttgtgtttctcgtagggacacttacaagggttcatcattgaaaatggagaagacaatggggttctctggcatactaggcagcaagcaagcagctaatcctgatttttataactggaatagaatcaagatcagatactgtgatggttcatcatttactggtgatgtggaagctgttgatccgaaaactaagctttacttcaggggagaaaggatttggcaggctgtcattgatgatctattggcgaaaggaatgagaaatgctcgaaatgctattctttctggatgctctgctggtggattggctgctattttgcattgtgataaattccagtctctcctgcctgcaagtgctagggtaaaatgtgtttctgatgctggttattttatccatggaacagacatctctggagggtctcgaattgaatccttcttcggtcaagttgttaaaacccatggatcagcaaagcatttgcctgcatcatgcacttcaaaaacgagaccagaattgtgtttcttcccacaatatgtggcacaggccatgcgaacgccactttttataatcaactcagcctatgattcctggcagataaagaacatccttgcaccaaccgctgttgattccaaaaaagaatggaagaactgcaagcttgacttgaaaaagtgctcggctactcaactccaaaccgtgcagaattataggacacaattcctaaaagcagtgaatattggactcggcagctcttcatcgagaggattgtggataaattcttgctacgctcactgccaatctgggtcggtatctacgtggttagccgacaaatcccccgtggtgggcaatgtgaaaatcggaaaggcagttggagattggttctatgaccgaagtgccttcgaaaaaatcgattgcgcttacccttgcaaccctacttgcgtcagtattgattccgaatcatga

SEQ ID NO: 148 - protein, 394 aa, Populus trichocarpa
MDGSSLGKWLCLIVHILTLLKTEGASIPMTIVQAAVARGAVCLDGSPPGYHFEKGSGSGINNWLVHMEGGGWCESVESCVSRRDTYKGSSLKMEKTMGFSGILGSKQAANPDFYNWNRIKIRYCDGSSFTGDVEAVDPKTKLYFRGERIWQAVIDDLLAKGMRNARNAILSGCSAGGLAAILHCDKFQSLLPASARVKCVSDAGYFIHGTDISGGSRIESFFGQVVKTHGSAKHLPASCTSKTRPELCFFPQYVAQAMRTPLFIINSAYDSWQIKNILAPTAVDSKKEWKNCKLDLKKCSATQLQTVQNYRTQFLKAVNIGLGSSSSRGLWINSCYAHCQSGSVSTWLADKSPVVGNVKIGKAVGDWFYDRSAFEKIDCAYPCNPTCVSIDSES

SEQ ID NO: 149 - DNA, 1122 bp, Populus trichocarpa
atgcagtccctagttcaagcaatttccatttgtttagatgggagtttgcctggctaccatttccgtaaaggatttggatctggctctaacagttggattcttcacattgagggcggagggtggtgcaatacgatagcatcatgtttgcaacggaagtcaacggcattaggatcctccagctacatggaccaccaagtccccttttctgggatattaagccatcaatcctctcaaaatcctgatttctttaactggaataaagtcaagatacgttactgtgatggcgcatcttttgctggccattcacaatatgagtttaagaatggtaccaagcttctattcagaggccacctcatctgggaagcccttatggatgaactgttatcaatcggcttatccaatgccaaacaggctcttctttcaggatgctctgctggtggattggcaactcttattcactgtgatgactttcgagaacttctgccaaaggatgcaactgtcaaatgtcttgctgatgcaggttttttccttgatgagaaagatgttcttggaaataacaccatgggatctttctatcaagatgttacccagcttcagggcgtagtgaaaagtttgcggaagaattgtataacaagaatggacccatataaggcaggttcttttccccttttctctgggtatgtgtgtctctttcctcaagaaatcattaaagaaacaaggaccccaattttccttgtcaacccagcttatgatttttggcagatacaacacatcttggtaccagatgcatcagatcctcaaggctattggaaaagatgcagaatgaaccttcactattgtaatcctagccagatggaaatactgcaaggtttccgtagttctatgctgaaagcactgagtgatttccagcaaaaaaaggaaggggggctgttcataaattcttgctttagtcattgtcaaacatggatggctgagacatggcattcatctacatctcctagaatcaacgataagaccattgcagagtcagtaggtgattggtacttcaaccgtaacatggtaaagcaaattgactgcccttatccatgcaaccccacttgctataacatggattttagttga

SEQ ID NO: 150 - protein, 373 aa, Populus trichocarpa
MQSLVQAISICLDGSLPGYHFRKGFGSGSNSWILHIEGGGWCNTIASCLQRKSTALGSSSYMDHQVPFSGILSHQSSQNPDFFNWNKVKIRYCDGASFAGHSQYEFKNGTKLLFRGHLIWEALMDELLSIGLSNAKQALLSGCSAGGLATLIHCDDFRELLPKDATVKCLADAGFFLDEKDVLGNNTMGSFYQDVTQLQGVVKSLRKNCITRMDPYKAGSFPLFSGYVCLFPQEIIKETRTPIFLVNPAYDFWQIQHILVPDASDPQGYWKRCRMNLHYCNPSQMEILQGFRSSMLKALSDFQQKKEGGLFINSCFSHCQTWMAETWHSSTSPRINDKTIAESVGDWYFNRNMVKQIDCPYPCNPTCYNMDFS

SEQ ID NO: 151 - DNA, 1188 bp, Populus trichocarpa
atggaattagcagtagccatgctattaatactgctgaatttagcatcgtggtgcgtgctttcagagggccggcttcttgtggacatgactctggtttccgatgcttccagcattggtgccttttgcttggatggaagtttgcctgcgtatcatctgcacagaggattcggagctggtgcaagcaactggcttttgcaatttgagggaggtgggtggtgcaatgatatacaatcatgcttggatcgagccaaaacgaagcatggatctagcctttacatgaacaagttggaggatttcaatggaatcctaagcaacgatgcctcacttaatccagatttttataattggaaccgtgtgaagcttagatattgtgatggaggttcgttttctggagatgccaaatttgacaatgggacatcagtcctttacttcagaggacaaaagatttgggaagcaatgattcttgatctcctccccaaaggtttggggaatgcagacaaggctttgctttcaggttgctctgctgggggtttatcatcctttctccaatgcgaaaacttttaccgggcattaccgacgaataccagtgtgaaatgcttgagcgatgctggattttttttggatgaaagagacatcactctgaactacaccatgaggaccttctttgaaaaccttgtttctctacagggaattgaaaagaatctggataaaaactgcactagtttccttgacaatccaaaactgtgcatgtttccacagtatttcttgaattacatgacaacaccattcttcatcctgaacacagcctatgatgtataccaattccatcatgcattggttccaccctctgctgacatgaatggagactggaagcgttgcaagcttagcatagcatcatgtactccacagcagcttgacatactgcaaggctggggtgatatgctggcggcattgagttcatttctcaaggattccacaagcgggggaatgtttataaattcatgctttgctcattgccaaagtgagacacaagaaacatggtttgcacttgggtccccgagtatccaggataagactattgcaggagcagttggtgattggtattttagtagaaatataagcaagttaatcgactgtgcgtatccttgcgacgcttcctgccataacatcattgcacaggtttcctag

SEQ ID NO: 152 - protein, 395 aa, Populus trichocarpa
MELAVAMLLILLNLASWCVLSEGRLLVDMTLVSDASSIGAFCLDGSLPAYHLHRGFGAGASNWLLQFEGGGWCNDIQSCLDRAKTKHGSSLYMNKLEDFNGILSNDASLNPDFYNWNRVKLRYCDGGSFSGDAKFDNGTSVLYFRGQKIWEAMILDLLPKGLGNADKALLSGCSAGGLSSFLQCENFYRALPTNTSVKCLSDAGFFLDERDITLNYTMRTFFENLVSLQGIEKNLDKNCTSFLDNPKLCMFPQYFLNYMTTPFFILNTAYDVYQFHHALVPPSADMNGDWKRCKLSIASCTPQQLDILQGWGDMLAALSSFLKDSTSGGMFINSCFAHCQSETQETWFALGSPSIQDKTIAGAVGDWYFSRNISKLIDCAYPCDASCHNIIAQVS

SEQ ID NO: 153 - DNA, 1266 bp, Populus trichocarpa
atgaagcaggtgcaagtgttgtccctgttcgtgtgtactttaattgggaatgttttgagcggatctaaccatgtttttcaagatttgaaagatagggaaggagtcctttccttccttgagtactatgcggctgtctcaccttcttcctctgttactgataaacctctcatggtcggcctcactcttattcagggagctgattccagtggagctgtctgtttggatggaacactgcccggttaccacttggatcgtgggtctggaacgggaaaagatagctggctcgttcagttagagggaggagggtggtgcgataccattagaaattgtgtttaccgcaaaactactcgtcgtggttcatcaaaactttttgaaaagcaattacctttcactggaatattaagtgataaagcagaagaaaatccagatttctttaactggaacagagtaaaggtacgttattgtgatggcgcatcttttagcggggacagtcagaatgaggcttcacagctttattttcgaggacaacgtatctggtcagctgcaatggaatatttaatggctgaaggaatgcaaaatgccactcaggctcttctctctggatgctctgctgggggcttggcatccataattcattgtgatgaattcagggaattatttccacagtctacaaaagtgaaatgcttaagtgatgctggaatgtttctcaatgcaatggatatatcaggtgggcacaccctgcaaaacttttatagtggtgtagtcagcttacaggaagtgcaaaagagtctgccaagtacttgtattgaccacctagatccaacttcgtgcttctttccccagaatttggttgctgctgtaaggactccactatttcttctcaattcagcctatgatgtatggcagctgcggtccagtttagctccaccatcagctgatcctcatggtacatggaaagaatgcagacaaaataatgcacaatgtaattcatcacagatccaatttttgcaagacttcaggaatcaaatgctggatgccataaaagtcttttcatcatccaatcaaaatggtttgttcataaattcttgttttgctcattgccaatctgagagacaagatacatggttcgctgatgattctccacgtatagggaacaagaggattgcacaatctgttggagactggtattttgatcgggaagatgttaaagctgttgactgtccatacccctgtgacaacacatgccataatctagttttcaagtga

SEQ ID NO: 154 - protein, 421 aa, Populus trichocarpa
MKQVQVLSLFVCTLIGNVLSGSNHVFQDLKDREGVLSFLEYYAAVSPSSSVTDKPLMVGLTLIQGADSSGAVCLDGTLPGYHLDRGSGTGKDSWLVQLEGGGWCDTIRNCVYRKTTRRGSSKLFEKQLPFTGILSDKAEENPDFFNWNRVKVRYCDGASFSGDSQNEASQLYFRGQRIWSAAMEYLMAEGMQNATQALLSGCSAGGLASIIHCDEFRELFPQSTKVKCLSDAGMFLNAMDISGGHTLQNFYSGVVSLQEVQKSLPSTCIDHLDPTSCFFPQNLVAAVRTPLFLLNSAYDVWQLRSSLAPPSADPHGTWKECRQNNAQCNSSQIQFLQDFRNQMLDAIKVFSSSNQNGLFINSCFAHCQSERQDTWFADDSPRIGNKRIAQSVGDWYFDREDVKAVDCPYPCDNTCHNLVFK

SEQ ID NO: 155 - DNA, 1185 bp, Populus trichocarpa
atggctggttcaagattaggccaatggccgtgtcttgttgtttgcatactgatattgctcaaggcagaaggagctagcattcccattactattgtcgagactgctgtttcaagcggagctgtttgcttagatgggagtccgccaggttaccactttgacaaaggatctggttctgggattgataactggttggttcacatggagggaggaggatggtgtgagagtgttgagtcctgtgtatctcgtagggacactttcaggggttcttcatcgaaaatggagaagacaatggggttctctggcatactgggcagcaagcaagcagctaatcctgacttctataactggaatagaatcaaagtcagatactgtgatggttcatcatttactggtgatgtcgaagctgtcgatccggaaactaagctttacttcaggggagagagggtttggcaggctgtaattgatgaactattggcgaaaggaatgcaaaatgctcgaaatgctattctttccggatgttctgctggtggattggctgctattttgcattgtgataaattccaatccctcctgcctgcaactgctagagtaaaatgtgtttctgatgctggttattttattcacgggacggacatttctggagggtctcgaattgaatccttcttcggtcaagtcgttaaaactcatggatcagcaaagaatttgcctgcatcatgcacttcaaaaatgaatccggagttgtgtttcttcccacaatatgtggcgcagactatgcgaacaccacttttcatcataaactcagcttacgattcctggcagataaaaaacattcttgcaccaacagctgttgattccaaaaaagaatggaaggactgcaagcttgatttgaaaaaatgctcagctagtcaactccagaccgtgcaagattacaggacacaattcttaaaagcagtggatactggacttggcagttcttcaacaagaggattgtggatagattcttgctatgctcactgccaatctgggtcggtatctacctggttaaacgataaatctcccgaagtgggcgatacgaaaatgggaaaggctgttggagattggttctacgaccgaagtgccatggaaaaaatcgattgcccttactcttgcaaccctacttgtgtcagtgttgattctgaatcgtaa

SEQ ID NO: 156 - protein, 394 aa, Populus trichocarpa
MAGSRLGQWPCLVVCILILLKAEGASIPITIVETAVSSGAVCLDGSPPGYHFDKGSGSGIDNWLVHMEGGGWCESVESCVSRRDTFRGSSSKMEKTMGFSGILGSKQAANPDFYNWNRIKVRYCDGSSFTGDVEAVDPETKLYFRGERVWQAVIDELLAKGMQNARNAILSGCSAGGLAAILHCDKFQSLLPATARVKCVSDAGYFIHGTDISGGSRIESFFGQVVKTHGSAKNLPASCTSKMNPELCFFPQYVAQTMRTPLFIINSAYDSWQIKNILAPTAVDSKKEWKDCKLDLKKCSASQLQTVQDYRTQFLKAVDTGLGSSSTRGLWIDSCYAHCQSGSVSTWLNDKSPEVGDTKMGKAVGDWFYDRSAMEKIDCPYSCNPTCVSVDSES

SEQ ID NO: 157 - DNA, 1200 bp, Populus trichocarpa
atggtagattcaagattaggccactggttaaaactcctggtttctctgatgttattgctgaaaacacaagggctttatgtaggaattacttacgtaaagagtgcagtggccaaaggagctgtttgtttggatggaagcccgccggcttaccactgggataaagggtttggtacaggcattaatagttggttgatacattttgagggaggaggatggtgcaacaatgtcacgagctgcctttcccgtaagaaaactcatttaggttcatcgaagctaatgggacagcaaattgctttctctgggattatgaacaacaagcggccgtttaatccagatttttacaattggaatagagttaagatcagatactgtgatgggtcatcgtttaccggtgatgtgcaggcagtcaatcctgctactaatcttcacttcagaggagctaggatttggcttgctgtcattgaggatctattaccaaaaggattgaaaaatgctgaaaacgctcttctttctggctgttcagctggtggattggcttccattttgcattgcgacagtttccgtgcactcctacgtatgggcactaaagtaaaatgcctttcagatgctggttattttatcaaagtgaaggatgtctccggagccccgcatgtgcagacctactttaatgaaattgtgacattacatggatctgcaaaaaatctgcccctgtcctgcacttcagtgctgaaaccctcattctgtttcttcccacaatatgtggctccacaagtacgaacgccacttttcattcttaatgcagcctacgattcatggcagataagaaacattttggcaccgagtattgctgatccccttggcgtctggaagagctgcaagctagacataaacaactgctcacctcttcaactcaaatctatgcaagattttaggttgcagtttctgaatgcattgaataaatcaaccaactcttcatctagaggattgtatatagactcttgctatgcccactgccaaactgaaacacaagagaaatggttcatggaagactccccagtgcttggtaaaaagaaaattgcaaaggcagttggagattggttttatgatcggaatccattccaaaagattgattgtccttacccttgcaatccatcttgccaaaacagtggtttggctccaccagacaacccagaagtatag

SEQ ID NO: 158 - protein, 399 aa, Populus trichocarpa
MVDSRLGHWLKLLVSLMLLLKTQGLYVGITYVKSAVAKGAVCLDGSPPAYHWDKGFGTGINSWLIHFEGGGWCNNVTSCLSRKKTHLGSSKLMGQQIAFSGIMNNKRPFNPDFYNWNRVKIRYCDGSSFTGDVQAVNPATNLHFRGARIWLAVIEDLLPKGLKNAENALLSGCSAGGLASILHCDSFRALLRMGTKVKCLSDAGYFIKVKDVSGAPHVQTYFNEIVTLHGSAKNLPLSCTSVLKPSFCFFPQYVAPQVRTPLFILNAAYDSWQIRNILAPSIADPLGVWKSCKLDINNCSPLQLKSMQDFRLQFLNALNKSTNSSSRGLYIDSCYAHCQTETQEKWFMEDSPVLGKKKIAKAVGDWFYDRNPFQKIDCPYPCNPSCQNSGLAPPDNPEV

SEQ ID NO: 159 - DNA, 1182 bp, Populus trichocarpa
atgaatgaagaagagatattttacactgaagctaatgcttcttattacattgaatctaaagcttataatcccaataatgctttgttggttggccttactcttatcaaatcagctgctgctaaaggagcagtctgtttggatggaacattgcctggataccattggcatcgcgggtatggttcaggagcaaatagttggcttattcaattggagggaggaggatggtgtaattctgttagagcttgtgtttaccgaaaaacaactcggcgaggctcatctaactatatggaaaagcagttggcattcactggaatactgagcaataaagctgtagaaaatcctgattttttcaactggaacagagtaaaacttcgatactgtgatggtgcctcttttacgggggacagtgaacacaaggctgcacaacttcaatttagaggacaacgtatatggtcagctgcaatggaagatttaatgtctaaggggatgcgctatgccaatcaggctcttctttctggctgctctgctgggggtctagcttccattttacactgtgatgagtttaggaacttctttccgagaaaaactagagtgaaatgcctgagtgatgctggtttattccttgatgcagttgatgtttctggtgggcgaacgttaagaaacttatatggtggtgttgtgggcttgcagggggtgcagaataaccttccacgcatatgcatcaaccaccttgatccaacttcgtgcttcttccctcaaaacgtaattggcaatgttaaaaccccactgttcattctcaacgcagcttatgattcatggcagatccagtccagcttagccccaccatctgcagatcctgctggctattggagtaattgcagaaaggaccactcaaaatgttctgcatcccaaatccagtttttgcaaggattcagaaatcaaatgttgaatgcgataaaaggcttttcaaggtctagacagaatggcttgtttataaattcatgttttgctcattgccaatcagagaggcaagatacatggtttgccgataattcccccgtacttgggaacaagccaattgcacttgctgttggagattggtatttcgaccggtcgggcgagaaggctattgactgcccctacccctgtgacagcagttgccacaatctggttttcagatga

SEQ ID NO: 160 - protein, 393 aa, Populus trichocarpa
MNEEEIFYTEANASYYIESKAYNPNNALLVGLTLIKSAAAKGAVCLDGTLPGYHWHRGYGSGANSWLIQLEGGGWCNSVRACVYRKTTRRGSSNYMEKQLAFTGILSNKAVENPDFFNWNRVKLRYCDGASFTGDSEHKAAQLQFRGQRIWSAAMEDLMSKGMRYANQALLSGCSAGGLASILHCDEFRNFFPRKTRVKCLSDAGLFLDAVDVSGGRTLRNLYGGVVGLQGVQNNLPRICINHLDPTSCFFPQNVIGNVKTPLFILNAAYDSWQIQSSLAPPSADPAGYWSNCRKDHSKCSASQIQFLQGFRNQMLNAIKGFSRSRQNGLFINSCFAHCQSERQDTWFADNSPVLGNKPIALAVGDWYFDRSGEKAIDCPYPCDSSCHNLVFR

SEQ ID NO: 161 - DNA, 1305 bp, Sorghum bicolor
atgccgccgccgtcgccgtcggccccggcctcgcaccacgtgcgcctgtggtggaggcgccgcggccgggccggcgcagtcggggccaccttcaccgtcgcgctcctcgcggccgcgctgctcctcgcgctctccagctacgcctccgtagtattccccgcgtccggtggccgccgcggccccgccctcgtcgggctcaccctcgtccgccgcgccagagagaagggcgcgctgtgcttggatgggagcgcgcccgggtaccatctgcagagagggtctgggagtggatcgcagagctggctaatccacttggagggtggaggctggtgccgtaatctcaagtcatgtgcgtcacgtcagagatcaatgttgggctcatcccggtacatggaaggccaggttgagtttacagggatcttgagcgatgacagatctcagaatcccgacttttacaattggaataaagtgaagataaggtattgtgatggggcatcattctctgggaatgtaaaagatgaattgcagaatggcacaagattcttcttcagaggccagcgtatctgggaagcagttatgaacgaacttgtagttaaggggctccgaaatgctaaacaggctttcctaacaggatgctctgctggtgggctagccacttacattcactgtgattcttttcgtgcgctgctaccaaaggattctagggttaagtgtcttgcggatggcggatttttccttgatgtagaagacatttctgggagaaggacaatgcagtctttctacagtgatgttgtgcgccttcagggtctaagggaaaggttttcacattgtaactcaaacatggaggcgggccagtgtttatttccacgtgaagttgtgaaacacattgtcaacccagtctttgttcttaatccagcatatgatgcttggcaggtacaacatgcgttggctccagaagcatctgaccctcaacattcatggctggactgcagattggatattagcaagtgcggctctgaacaacttgaaattctccaaggtttcaggaaagaactgcatgacgctataagtgaagtgaagcagaaaagggactggggattctatatcaactcgtgttttgttcactgccagtcgctaaactcgttgacttggcactctccaacttctcccagagtcaacaataagagcattgcagaagcagttggagactggttctttgacagaagagaggtgaaggagatagattgcgaatacccctgcaacccgacgtgccacaacttggtgttcgcaaaggctttcaagatttga

SEQ ID NO: 162 - protein, 434 aa, Sorghum bicolor
MPPPSPSAPASHHVRLWWRRRGRAGAVGATFTVALLAAALLLALSSYASVVFPASGGRRGPALVGLTLVRRAREKGALCLDGSAPGYHLQRGSGSGSQSWLIHLEGGGWCRNLKSCASRQRSMLGSSRYMEGQVEFTGILSDDRSQNPDFYNWNKVKIRYCDGASFSGNVKDELQNGTRFFFRGQRIWEAVMNELVVKGLRNAKQAFLTGCSAGGLATYIHCDSFRALLPKDSRVKCLADGGFFLDVEDISGRRTMQSFYSDVVRLQGLRERFSHCNSNMEAGQCLFPREVVKHIVNPVFVLNPAYDAWQVQHALAPEASDPQHSWLDCRLDISKCGSEQLEILQGFRKELHDAISEVKQKRDWGFYINSCFVHCQSLNSLTWHSPTSPRVNNKSIAEAVGDWFFDRREVKEIDCEYPCNPTCHNLVFAKAFKI

SEQ ID NO: 163 - DNA, 1173 bp, Sorghum bicolor
atggcggcgtcccgggcatggctggcccgtgccacggcggcggcggtgctgggtttcgtcctggtggtggcgtcagctgaggcggcatcgggggacgtggagatggtgttcctcaaggccgcagtggccaaaggtgcagtgtgcttggacggcagcccaccggtttaccacttctctcccggctctggttctggcgccgataactgggtgggaggagggtggtgcaggaatcctgatgaatgtgcagtccggaagggcaacttcaggggctcctccaaatttatgagaccactctcattttcagggatattaggcggcagccaaaaatccaatcctgatttctacaactggaatagaataaaggtcagatactgtgatggttcatcatttactggtgacgttgaggctgtggacactgcgaaaaatctccattacagagggttcagagtttggcgtgccatcatggatgatctacttactgtgaggggaatgaacaaggcaaaatacgctcttctttctggatgttcagccgggggtctagcagcaatactacattgtgataggttccgtgatctgtttccagcgacaacaaaggtcaagtgtttttctgatgctggatattttttcgatgggaaggatatctctgggaactattacgccaggtcaatctataagaacgttgtgaatctacatggatcagccaaaaatttaccagcttcatgtacctcaaagcaacctgagctgtgtatgttcccacagtacgtagtaccgacaatgcgtacaccattgttcatacttaatgcagcctatgattcatggcaggtcaagaacgtcctagcacctagtccagctgatccgaagaagacttgggcccaatgcaaacttgatatcaagagctgctcccccagccaactcacaaccttgcagaatttcaggacagactttctggcagcacttcctaaaactccatctgtaggcatgttcatcgactcatgcaatgctcattgccaatcaggatctcaagatacatggctagccgatggttctcccacggttaataagacgcaaattggcaaggcagtgggggactggtacttcgacagggaggtctctcggcagattgattgcccgtatccctgcaacccaacttgcaagaaccgtgaggatgactga

SEQ ID NO: 164 - protein, 390 aa, Sorghum bicolor
MAASRAWLARATAAAVLGFVLVVASAEAASGDVEMVFLKAAVAKGAVCLDGSPPVYHFSPGSGSGADNWVGGGWCRNPDECAVRKGNFRGSSKFMRPLSFSGILGGSQKSNPDFYNWNRIKVRYCDGSSFTGDVEAVDTAKNLHYRGFRVWRAIMDDLLTVRGMNKAKYALLSGCSAGGLAAILHCDRFRDLFPATTKVKCFSDAGYFFDGKDISGNYYARSIYKNVVNLHGSAKNLPASCTSKQPELCMFPQYVVPTMRTPLFILNAAYDSWQVKNVLAPSPADPKKTWAQCKLDIKSCSPSQLTTLQNFRTDFLAALPKTPSVGMFIDSCNAHCQSGSQDTWLADGSPTVNKTQIGKAVGDWYFDREVSRQIDCPYPCNPTCKNREDD

SEQ ID NO: 165 - DNA, 1197 bp, Sorghum bicolor
atggcggacgggagcctctgcgcctggtggtgctgtgccgtagcctgcgcgctggcggttgtcgcagcggacggcgtcctcgtggacatcacctatgtggaaagcgccgtggccaaaggagcagtgtgtttggatggtagcgcgccggcgtaccatctcgcccgcggctccggctccggcgagaacagctggctggtccatttcgagggtggaggatggtgcaacaatgtcacgacctgcctgcagcggaagcgcacgcgattgggatcatccaaggagatggcgacgcagattgccttctccggaatcctcagtgacacgccggatggcaacccagacttttacaattggaacaaagtcaaggttcggtactgcgatggttcatctttcactggcgatgttgaagaagttgatcctacaacaaagttacactttagaggtgcgaggatatggcaagctgtcatggaggacctgcttgcaaaagggatggacaaagctgaaaatgctctaatttcaggctgttctgctggcggtttaacctccatactacactgtgacagatttcatgaccttctgccgctggctgcaagagttaaatgcctttctgatgctgggttcttcattaacgagaaagatgttgctggagttgggtacattgctgcttttttcaacgatgtggttacaacacatgggtcagcaaataatttaccgccttcatgcacttcaatgttacctccaggaatgtgctttttccccaagaacgaggtgaaacagatacatacacctctattcatcctcaacgcagcatatgattcatggcaggtaaggaacattttggtgccaggagttgctgaccctcatggtaaatggcatagctgtaagcatgacatcggccagtgctctgcatcgcagctacgggtattgcagggattcaggggtgattttttgaaggaagtgtctgaacaagcgaactccgactcaagagggttgttcataaactcatgcttcgtgcactgccagtctgagtcgcaggagctatggttctcatctgactcccccaagctcggaaacacaacaatagcaaacgctgttggcgactggttcttcggtcgcagctccttccagaagatagactgcccgtacccttgtgactcgacctgtcacaatgggatctacgaggactcatcacaagcatag

SEQ ID NO: 166 - protein, 398 aa, Sorghum bicolor
MADGSLCAWWCCAVACALAVVAADGVLVDITYVESAVAKGAVCLDGSAPAYHLARGSGSGENSWLVHFEGGGWCNNVTTCLQRKRTRLGSSKEMATQIAFSGILSDTPDGNPDFYNWNKVKVRYCDGSSFTGDVEEVDPTTKLHFRGARIWQAVMEDLLAKGMDKAENALISGCSAGGLTSILHCDRFHDLLPLAARVKCLSDAGFFINEKDVAGVGYIAAFFNDVVTTHGSANNLPPSCTSMLPPGMCFFPKNEVKQIHTPLFILNAAYDSWQVRNILVPGVADPHGKWHSCKHDIGQCSASQLRVLQGFRGDFLKEVSEQANSDSRGLFINSCFVHCQSESQELWFSSDSPKLGNTTIANAVGDWFFGRSSFQKIDCPYPCDSTCHNGIYEDSSQA

SEQ ID NO: 167 - DNA, 1323 bp, Sorghum bicolor
atggccaccaccgaactccggtcgccgctcctccctctgccgccaccgccgcagcgccagcgacgaataagcgctcgggcagcagcgctcgccgtttcggcgacggtggtcgtcctgctccttcccttcctgatcgccagcttcggcggcaccaccagcacgagcagacggcacccgccccggcaccgatcatcctcatcctcatccaacctcgtcgagctcaccctgctgaccgccgctcaggacaagggcgcagtgtgcctggacggaagcccgccggggtaccacctgcaggcgggcaccggcgccgggtcaagcagctggctcatccatctcatggggggcggctggtgcgacaccgtgcgcagctgctccgaccgcagcaagggctacctcggttcgtccctctacatggagaaactgatggacttctctgggattctcagcaacgatccggcacagaatcctgatttctacagctggaacagagtgtttgttaggtactgcgacggggcatcattttcgggggattcccagctcgaggcggctgagcatgggaacggcacgctcttcttcagaggcctgcgcatctgggaggcgaccttgctcacaggctgttctgctggtggtctggctacgctgctgcattgcaacgattttcgctcacggtttcctcctgaggttaccgtgaaatgcctctccgatgctggattctttgttgatgcaaaggatttgtcagggcagcgctccatgcggtctgtttacaacggagttgttcatcttcagaatgttacttctactaaagttttgcccaaggactgcctcctcgcaaacaaggatcccacacagtgcttctttcccgcggagcttattaagagcctcagcacgcccacattgatcgtaaactctgcttacgactcttggcaggtacgttttgttgttgcgccggatggatcgtcccccgatgagtcatggcgcagctgcagagctgacgttcgcagatgcaattcctcacagatacaagtcctcaatgcattcaggaaggagatggtagatgaccttgaggctgctgacgacaacaccaacaacagctggttcatcgattcatgcttcacccattgtcagactatcttcgatgattcaggatggaacaaacaggtcgccccgaggatcggaaacaagacactgaaggaggtaatgggggattggtactttggtaggagcccaagcccggtggtaagacaagttggctgcgagtatccatgcaatcccacaggttgccagcttgcacaacagagctcttctgcacgaaccaaagaataa

SEQ ID NO: 168 - protein, 440 aa, Sorghum bicolor
MATTELRSPLLPLPPPPQRQRRISARAAALAVSATVVVLLLPFLIASFGGTTSTSRRHPPRHRSSSSSSNLVELTLLTAAQDKGAVCLDGSPPGYHLQAGTGAGSSSWLIHLMGGGWCDTVRSCSDRSKGYLGSSLYMEKLMDFSGILSNDPAQNPDFYSWNRVFVRYCDGASFSGDSQLEAAEHGNGTLFFRGLRIWEATLLTGCSAGGLATLLHCNDFRSRFPPEVTVKCLSDAGFFVDAKDLSGQRSMRSVYNGVVHLQNVTSTKVLPKDCLLANKDPTQCFFPAELIKSLSTPTLIVNSAYDSWQVRFVVAPDGSSPDESWRSCRADVRRCNSSQIQVLNAFRKEMVDDLEAADDNTNNSWFIDSCFTHCQTIFDDSGWNKQVAPRIGNKTLKEVMGDWYFGRSPSPVVRQVGCEYPCNPTGCQLAQQSSSARTKE

SEQ ID NO: 169 - DNA, 1254 bp, Sorghum bicolor
atgacggatcggccgtcgtttccggctctcattgctctcgccgttcttgtggtgggcagctactgctgcgtggcgacctcggccgcctcgccggcggtggaagatgatgagctgcgtggtcggacgatgcggcggcgccgcgcggcgtcggtgatggtgcccatcaccatcctcaagtccgcagtcagcgacggagctgtgtgcatggatggaacgccacctgcttacaacttggatcctggctccggaacgggtagcagaagctggattgtgaacttagagggaggtgcatggtgcaacagcgccaagacatgccggcttaccaagagctccgggcgcggctcgtcggaccacatggataaagagatccccttcaccggcatcatgagcagcagcagcgccgtcaatcctgatttctacaattggaaccgggtaaagattcgctactgcgacggtggatcttttgccggcgaggcctttgataagaacactgggatttatttccgagggcagcgcatctggaacgcggtcatccggcacctcctctccattgggatggcctctgctgatcgtgtgctgctcaccggctgctcctcggggggtctggcggtgatcctgcactgcgaccagttgcgcgccttcttcccgtccggcaccaccgtcgtcaagtgcatctccgacggcggcctctacctcgacgccgtggatgtctccggtggccggagcctgagatcctacttccgtgacatcgtggccatgcaaggaatagctcagaacctgccgccggcttgcaccgcccgtctcgacgccacctcgtgcttcttcccgcaaaacataatcgatggcatcaagaccccactgtttctgctaaatgcagcatacgacttcattcagattgtgctcagcctggcgccagacagagctgacccaaacggcgcttggcgagcctgcaagtccaaccgcacggcctgcagtgcatcccagatgagtttcctgcaagatttcagggaccagatggtagcatccgtcagaggcttctccggttccaggagcaacgggctcttcataagctcctgcttcgcgcactgccagtcggagcagctgggcacctggaacaccaaaccaggtggctcccccaccattcaaaacaaggggattgcaaaatccgttggtgactggtactttgatcgagctgaagtgaaggcgatcgactgccgctatccctgcgacaacacttgccaccatatcatatga

SEQ ID NO: 170 - protein, 417 aa, Sorghum bicolor
MTDRPSFPALIALAVLVVGSYCCVATSAASPAVEDDELRGRTMRRRRAASVMVPITILKSAVSDGAVCMDGTPPAYNLDPGSGTGSRSWIVNLEGGAWCNSAKTCRLTKSSGRGSSDHMDKEIPFTGIMSSSSAVNPDFYNWNRVKIRYCDGGSFAGEAFDKNTGIYFRGQRIWNAVIRHLLSIGMASADRVLLTGCSSGGLAVILHCDQLRAFFPSGTTVVKCISDGGLYLDAVDVSGGRSLRSYFRDIVAMQGIAQNLPPACTARLDATSCFFPQNIIDGIKTPLFLLNAAYDFIQIVLSLAPDRADPNGAWRACKSNRTACSASQMSFLQDFRDQMVASVRGFSGSRSNGLFISSCFAHCQSEQLGTWNTKPGGSPTIQNKGIAKSVGDWYFDRAEVKAIDCRYPCDNTCHHII

SEQ ID NO: 171 - DNA, 1020 bp, Sorghum bicolor
atggcgactgccgagcacacgtcgtcgtcgtcgttgcctgtccggcagcatcgacctgccggatggggcacggtcatggcggcaatgttcctggccctgctggccgccttcggtcgctcaccacctgtggcaatggcggcggcggactcttctccggagctcatcgagctgacgctcctcaccggcgcgaaggagaagggcgcagtgtgcttggatggaagcccgccgggttaccactttcagagaggtttcggctccggatctcacagctggatcgtatttcttcagggaggagcttggtgcagtaataacaccacacaaacttgttctcagcgtaaaatgacctccaatggttcgtccaagcttatggaagcaataacctttgatgggatattcagcgaccagcagccacaaaatcccgatttctacaactggaataaagtctttgtaaggtattgcgatggggcatcattttctggggacgcggagggtgaagcacaggatggaactaaactgttcttcagaggatcacgcatctgggatgcagtcgtcgatgaactcatgggaaaaggaatggacactgctaagcaggccttacttgcaggttgttctgctggtggtctagctacactagtgcactgcgataattttcgtgcgagatttcctcaggaggttccggtcaaatgccttcctgatggtggattctttcttgatataaaggatttatcaggagaaaggcatatgaggtcgatgttcagtggagttgttcagcttcagaatgttagcaaagttttgcccaaggactgtctggcaaagaaggatccaacagagtgtttcttcccggctgaacttgtcaagagcatcagcaccccgacgtttattgtgaactcagaatatgattcttggcagattgcaaatgttgttgcgccagacggatcgtatcctggagacacatggtccaactgcagagctaatattcagaactgcagttccaagcagatcgatgtgctccatggttag

SEQ ID NO: 172 - protein, 339 aa, Sorghum bicolor
MATAEHTSSSSLPVRQHRPAGWGTVMAAMFLALLAAFGRSPPVAMAAADSSPELIELTLLTGAKEKGAVCLDGSPPGYHFQRGFGSGSHSWIVFLQGGAWCSNNTTQTCSQRKMTSNGSSKLMEAITFDGIFSDQQPQNPDFYNWNKVFVRYCDGASFSGDAEGEAQDGTKLFFRGSRIWDAVVDELMGKGMDTAKQALLAGCSAGGLATLVHCDNFRARFPQEVPVKCLPDGGFFLDIKDLSGERHMRSMFSGVVQLQNVSKVLPKDCLAKKDPTECFFPAELVKSISTPTFIVNSEYDSWQIANVVAPDGSYPGDTWSNCRANIQNCSSKQIDVLHG

SEQ ID NO: 173 - DNA, 1296 bp, Sorghum bicolor
atgccggccctctccacccaccaccttcagctgcgccgtctcggccgacgacgcggcgccgcattcgccctcgcgctgctcgccgccgccctcgtgctcacgctctcccgctacgccacgggccctgcagcctccccgcccgcgtccccgtcctacgggcatcgcctcccggccctcgtcgacatcaccctcgtctacggcgccaccgacaagggcgcagtgtgtttggatggtacgccgcctgcctaccacttccttccaggattcggggacggatcccacaactggctcctccacctggagggcggaagctggtgccgcagtttcgaatcatgtgctcgccgtaagaaaacaaatctcggttcgtctgcccacatggatactcgtgctgaattcgtcggcatcctcagtgatgatcaatctcagaatccagacttttacaactggaacaaagtgaaaataagatactgtgatggtgcatcattctctggacatgtccaagatgaagtcaagaatggcacaggtttcttcttcagaggccagcgtatctgggaagcagtcatggccgaacttctatcaaaggggctagccagagcgaaacaggcttttctgactggatgctcggctggtggcctttctacatacattcactgtgatgatttccgggcagttctaccgaacacgcctactgtcaagtgcctcgcagatggtggattcttccttgatgtagaagacatttctggaagaaggtatatgcggggcttctataacgatgttgctcggctgcaggatgtgcataaaaggttccctcattgcagctcagatatggaaccagggcagtgcttcttcccacaagaagttgcgaaaagcatcaccacgccgatgtttatactcaatccagcatatgatgtttggcaggtagagcatgtgttgtctccagaaggttctgaccctcaaaatctatggcaaaattgcaggacggacattaccaagtgtagctcaaaacagcttgaagttcttcaaggttttaggaaagcactgcttgatgctataaatgaattcaagaagagaagagactggggtatgttcattgactcctgctttatacactgtcaatcaatgaaagctttggcttggcattcaccatcagctgctagaatcaacaacaagacggccgccgaagcggtgggagattggttctttgatcggagggaggtgaaggaaatagattgtgaatatccctgcaacccgacatgctacaatgtggttcttgatcagccctacaaggaagactaa

SEQ ID NO: 174 - protein, 431 aa, Sorghum bicolor
MPALSTHHLQLRRLGRRRGAAFALALLAAALVLTLSRYATGPAASPPASPSYGHRLPALVDITLVYGATDKGAVCLDGTPPAYHFLPGFGDGSHNWLLHLEGGSWCRSFESCARRKKTNLGSSAHMDTRAEFVGILSDDQSQNPDFYNWNKVKIRYCDGASFSGHVQDEVKNGTGFFFRGQRIWEAVMAELLSKGLARAKQAFLTGCSAGGLSTYIHCDDFRAVLPNTPTVKCLADGGFFLDVEDISGRRYMRGFYNDVARLQDVHKRFPHCSSDMEPGQCFFPQEVAKSITTPMFILNPAYDVWQVEHVLSPEGSDPQNLWQNCRTDITKCSSKQLEVLQGFRKALLDAINEFKKRRDWGMFIDSCFIHCQSMKALAWHSPSAARINNKTAAEAVGDWFFDRREVKEIDCEYPCNPTCYNVVLDQPYKED

SEQ ID NO: 175 - DNA, 1245 bp, Sorghum bicolor
atggcctcctccacttgcgctcttgccctggttcttgcgctgtcggtcggtgcaagcgtggcgcgtggctccgagccctggtggaacgagacgcaggtgtacaccaccaccgccaactccggtggcagcaacggcgtcttcgtcggcctcaccctcatccagtcggcggcggccaagggagcggtgtgcttggatggaagcttaccaggttaccacctgcacagagggtttggatcaggagcgaacagttggcttgtcaatctcgagggtggaggctggtgcaatgatgtcagcagctgtgtgttccgcaagggtagtcgtcgtggatcatcaaatcacatggagcggcaactccagtttacagggataatgagtaacagacctgatgagaatcctgatttctacaactggaatagagtgaaggtccggtactgtgacggtggatccttcactggtgatggctctgatgcggctgcaggcctttatttccgaggtcagcgtatttggcaggccgctatggatgacctaatggcccaaggaatgcgttatgctaatcaggcccttctttctggatgctctgccggtggtgtttctaccatacttcactgtgatgaattccgtggattgtttccatcaaataccagagtcaaatgcctggctgatgctggaatgtttcttgacactgttgatgtttctggccgtcgggaaatgagatcttttttcaatggcattgtgagattgcagggttctggaagaagcttgcctaggtcttgcaccgcacgcatggacaaaacctcgtgctttttcccgcagaacgtgttaccaaacattcaaaccccaacttttgttttgaacactgcctatgacgtgtggcagcttcaacaaagtgtggcccccagaacagctgatccccaaggtctttggtcaaagtgtaggacgaaccacgctttctgtaatagcaaccagcttcagtttttgcaagggtttaggaaccaaatgcttgatgccgtgaagggtttttctgcgtcaaggcgaaatggtttgttcatcaactcatgttttgctcattgccagagcgagagacaggatacttggtatgcgaacaactcgccacgtcttggtaacaagaaaatcgctgacgctgtcggtgattggttctttgagaggggagacgccaagtacacagactgcccatacccttgcgatggcacttgccatcatcttgtgttcaggggagaccattaa

SEQ ID NO: 176 - protein, 414 aa, Sorghum bicolor
MASSTCALALVLALSVGASVARGSEPWWNETQVYTTTANSGGSNGVFVGLTLIQSAAAKGAVCLDGSLPGYHLHRGFGSGANSWLVNLEGGGWCNDVSSCVFRKGSRRGSSNHMERQLQFTGIMSNRPDENPDFYNWNRVKVRYCDGGSFTGDGSDAAAGLYFRGQRIWQAAMDDLMAQGMRYANQALLSGCSAGGVSTILHCDEFRGLFPSNTRVKCLADAGMFLDTVDVSGRREMRSFFNGIVRLQGSGRSLPRSCTARMDKTSCFFPQNVLPNIQTPTFVLNTAYDVWQLQQSVAPRTADPQGLWSKCRTNHAFCNSNQLQFLQGFRNQMLDAVKGFSASRRNGLFINSCFAHCQSERQDTWYANNSPRLGNKKIADAVGDWFFERGDAKYTDCPYPCDGTCHHLVFRGDH

SEQ ID NO: 177 - DNA, 1257 bp, Ricinus communis
atggggaagcttttgtgggttatgtttgttatggtaagtgttattgggaaatgggcaaatgggttggaactgaatgagactgaaccagaaatactgtacactggagttgccagtgatgaaggttattttaatgaatccttggtttttaataatgctttgatggtaggacttactctcattcgaagtgctggtgctagaggagctgtttgtttggatggcacattgcctggctatcatttgcatcgtggatatggttcaggagcaaatagctggctcattcaattggagggtggaggatggtgtaataacattagaaattgtgtttaccgcaaaaaaactcggcgtggttcatcgaaatacatggaaaagcagttggcctttacgggaatcctaagcaataagcctcaagaaaatcctgattttttcaactggaacagagtaaaactccgttactgtgatggtgcctctttttctggagataatgaaaataaggctgcacagctgcaatttagaggacaacgcatatggttagctgcaatgcaagatttaatgtcaaagggaatgcgttatgccaaccaggctcttctttctgggtgctctgctgggggtttggcttctattttacactgtgatgaatttaggaacttatttcccagaagaactagagtcaagtgcctgagtgatgctggtttattccttgacgcagttgatgtttctggtggccgcaccctgaggaatatgtacagtggtgtggtgggtttgcagggggtacagaataacctgcctcgtatatgcactaaccaccttgatccaacttcgtgcttcttcccccaaaacataatcggcaatgtaaaaactccattgttcattcttaatgcagcctacgattcatggcagatacaatcaagcttagctccaccatctgccgatccccatggctattggaatgaatgcagaaagaaccatgcaaaatgttctgcaccccagatccaatttctgcaaggatttagaaatcaaatgctgcgtgcaataagaggcttctcgatgtcaaaacaaaatggattgtttataaattcatgttttgctcactgccaatcagagaggcaggatacgtggtttgccgatgattctcctgttattggaaataaggcagttgcaattgctgttggagattggtattttgatcggtcaggagtgaagctgatcgattgcccctatccatgtgacacacctgccacaatctgggttttcagatga

SEQ ID NO: 178 - protein, 418 aa, Ricinus communis
MGKLLWVMFVMVSVIGKWANGLELNETEPEILYTGVASDEGYFNESLVFNNALMVGLTLIRSAGARGAVCLDGTLPGYHLHRGYGSGANSWLIQLEGGGWCNNIRNCVYRKKTRRGSSKYMEKQLAFTGILSNKPQENPDFFNWNRVKLRYCDGASFSGDNENKAAQLQFRGQRIWLAAMQDLMSKGMRYANQALLSGCSAGGLASILHCDEFRNLFPRRTRVKCLSDAGLFLDAVDVSGGRTLRNMYSGVVGLQGVQNNLPRICTNHLDPTSCFFPQNIIGNVKTPLFILNAAYDSWQIQSSLAPPSADPHGYWNECRKNHAKCSAPQIQFLQGFRNQMLRAIRGFSMSKQNGLFINSCFAHCQSERQDTWFADDSPVIGNKAVAIAVGDWYFDRSGVKLIDCPYPCDTPATIWVFR

SEQ ID NO: 179 - DNA, 1350 bp, Ricinus communis
atgaatagtagggcagtagcgataagattgttgattttgctaaattgcggtatgtggtgcatttgcttgccggagcggcttctggttaatatgactctggttggcaatgcttcggctatcggtgccttttgcctggatggaagtttgcctgcgtatcatttccacagaggatccggtactggtgcacgcaactggcttttacagtttgagggaggtgggtggtgtaatgatttgcaatcatgcttggagagagcaaaaacgcggcgcggatcgacacgttacatgaacaagctggagaccttctcgggaatcctaagcaacaacgcctctcttaatccagatttttacaactggaaccgtgtgaagcttagatattgtgatggagcctcattcgctggagatgccaagtttgacaatgggacatcagtcctttatttcagagggcaaaggatttggcaagcaatcattcgcgatcttctccccaaaggtttggggcaagcacgtaaggcgttgctttcaggttgctctgctgggggtttatcaacctttctccattgtgacaactttgctaaggtgttaccaatgaatgccagtgtgaagtgcttaagtgatgcaggattttttctggatgaaaaggacgtcactttgaaccatacaataaggttgttctacgaaaatcttgttactctacagggagtagaaaagaatctaaacaaaaactgcaccagtttctttaacaatccaaaactgtgcatctttccacagtatgcattaaggttcattacaacaccattcttcatcttgaactcagcttatgatgtgtaccaagtgaaccatatattggtgcctccttctgctgacttgcctggattgtggaagaattgcaagcttaacacagcagactgcagtgaaacacagataggcgtattgcaaggtttcaggcgtgatatgctggtagccttgagaattttctataagtattccaatagcgtcggaatgtttataaactcatgctttgctcattgtcaaagtgagtcacaagacacatggtttgcagtcgactctccacggatacacaataagacaattgcagaaacagttggtgattggtattttagtagaaatagatccaaggagatcgactgtccgtacccttgtgacgatacctgccataacctcatacccacagctcgggatgaccgccggttcctgagcaacgcgtcagacaatgatcttgacagctgtgacgattgccctaaaggtcatgaagagaaaaactctggctttatcaagccgatgcatgggactgggatggccttatggttgctttttctgtttttgttggtctag

SEQ ID NO: 180 - protein, 449 aa, Ricinus communis
MNSRAVAIRLLILLNCGMWCICLPERLLVNMTLVGNASAIGAFCLDGSLPAYHFHRGSGTGARNWLLQFEGGGWCNDLQSCLERAKTRRGSTRYMNKLETFSGILSNNASLNPDFYNWNRVKLRYCDGASFAGDAKFDNGTSVLYFRGQRIWQAIIRDLLPKGLGQARKALLSGCSAGGLSTFLHCDNFAKVLPMNASVKCLSDAGFFLDEKDVTLNHTIRLFYENLVTLQGVEKNLNKNCTSFFNNPKLCIFPQYALRFITTPFFILNSAYDVYQVNHILVPPSADLPGLWKNCKLNTADCSETQIGVLQGFRRDMLVALRIFYKYSNSVGMFINSCFAHCQSESQDTWFAVDSPRIHNKTIAETVGDWYFSRNRSKEIDCPYPCDDTCHNLIPTARDDRRFLSNASDNDLDSCDDCPKGHEEKNSGFIKPMHGTGMALWLLFLFLLV

SEQ ID NO: 181 - DNA, 1269 bp, Ricinus communis
atgaagcaagggatggtgatggagatggggataatgctgttatacggttgtattttgattggaatggttttgggcggatctgttgatgttattctaaaatcagaagtcatgttgccttttctggagagcggtgcttcttcccctgctcctcctgctgctcccaaacctcttatggtcggccttactcttattcagggagctgacgccaaaggagctgtctgcttggatggaacattgcctgcctaccacttgcatcgtgggtctggatcgggtcaaaacagttggctcattcaattagagggaggcgggtggtgtaataccatcaggagctgtgtttaccgcaaaactacacgacgtggttcatccaaatttatggaaaaagtattacctttcactggaatattaagcaataaaccagacgaaaatccagatttctttaattggaacagagtcaagttacgatattgtgatggggcatctttcagtggggattatcatgatgaggctgcacagctttattttcgaggacaacgaatctggtcagctgctatggagaatctaatggctgaaggaatgctaaatgccactcaggctcttctttctggatgctctgctggaggtctggcatccatattacactgtgatgagttcagggacttgtttccacaatctacaaaagtgaaatgcttaagtgatgctggactttttcttgatgcaattgatgtgtctggcaatcgcacgctacggaatatgtatgaaggtgtagttagcttacagaaagtgcaaaagaatctaccgagcacgtgtaccagccgactggatccaacttcatgcttcttcccccagaatttgattgctaatattaagactccattgtttattctcaatgcagcctatgatacatggcaggttcaagctagtttggctccacctacagctgatcctcaaggttcttggaatgaatgcaaacaaaatcatgcacaatgtaattcatcccaaatccaatttttgcaagacttcaggaatcaaatgctagatgccataaacgtcttctcaatgacaactcaaaatggtttattcataaattcttgcttttctcattgccaatctgagagacaagatacatggtttgccactgattctccagtcattcgggacaagaggatctcacaatctgttggagactggtattttgatcgagttgatgttaaagccattgactgtgcatatccctgtgatagtagctgccataatctagtattcaagtga

SEQ ID NO: 182 - protein, 422 aa, Ricinus communis
MKQGMVMEMGIMLLYGCILIGMVLGGSVDVILKSEVMLPFLESGASSPAPPAAPKPLMVGLTLIQGADAKGAVCLDGTLPAYHLHRGSGSGQNSWLIQLEGGGWCNTIRSCVYRKTTRRGSSKFMEKVLPFTGILSNKPDENPDFFNWNRVKLRYCDGASFSGDYHDEAAQLYFRGQRIWSAAMENLMAEGMLNATQALLSGCSAGGLASILHCDEFRDLFPQSTKVKCLSDAGLFLDAIDVSGNRTLRNMYEGVVSLQKVQKNLPSTCTSRLDPTSCFFPQNLIANIKTPLFILNAAYDTWQVQASLAPPTADPQGSWNECKQNHAQCNSSQIQFLQDFRNQMLDAINVFSMTTQNGLFINSCFSHCQSERQDTWFATDSPVIRDKRISQSVGDWYFDRVDVKAIDCAYPCDSSCHNLVFK

SEQ ID NO: 183 - DNA, 1200 bp, Ricinus communis
atggtggattcaagattaggccaatggttgattcttctagcctgtgttttattgttgacaaacacagaaggcctttttgtagaaattacttatgttaaaaatgcggtagcaaaaggagctgtttgtttggatggaagccccccagcctatcatttagataaggggtttggtacgggcattaatagttggctggttcactttgagggaggaggatggtgcaacaatataacaacgtgcctttcccgtaagaatactcgtttaggttcctccaagcaaatgggacctcagattgctttctctgggattatgagcaacaggcgacgatataatcctgatttctacaattggaatagagttaagatcagatactgtgatgggtcatcttttaccggcgatgtgcaagcggtcaatcctgctactaatcttcacttcagaggagcaaggatttggcttgccgttattgaggagctattagctaaaggaatgaaaaatgctgaaaatgctcttctttctggctgttcagctggtggactggcttccattttgcattgcgatggcttccgagctctccttcctatgggtactaacgtaaaatgcctttcagatgctggttattttatcaatgcgagggatgtttctggagcggcgcacatacaaacctacttcaatgaagtggtttcgttgcatggatccgcaaaaaatttgcctctgtcctgtacttcaagattgaaacctgcattgtgtttcttcccgcaatatctggtgcagcaaatacgaacaccgctttttattctaaatgcagcatatgattcatggcagataaagaacattttggcaccgggtgttgctgatccccgtggctcctggaacagctgcaagcttgacataaacaactgctcccctattcaattgaaaactatgcaagattttcggatgcggttcttgagtgcattgtatagatcagccaactcttcttctaaaggactgtacatagactcttgctatgcccactgccaaactgaaacgcaggagacatggttcatggccgactctccagtactcagtaaaactaaaattgcaaaggcagttggagattggttttatgacaggattccattccagaagatagattgtccttacccttgcaatccgacctgctccaataatggtttaaatcctcgagataacccagaagtatag

SEQ ID NO: 184 - protein, 399 aa, Ricinus communis
MVDSRLGQWLILLACVLLLTNTEGLFVEITYVKNAVAKGAVCLDGSPPAYHLDKGFGTGINSWLVHFEGGGWCNNITTCLSRKNTRLGSSKQMGPQIAFSGIMSNRRRYNPDFYNWNRVKIRYCDGSSFTGDVQAVNPATNLHFRGARIWLAVIEELLAKGMKNAENALLSGCSAGGLASILHCDGFRALLPMGTNVKCLSDAGYFINARDVSGAAHIQTYFNEVVSLHGSAKNLPLSCTSRLKPALCFFPQYLVQQIRTPLFILNAAYDSWQIKNILAPGVADPRGSWNSCKLDINNCSPIQLKTMQDFRMRFLSALYRSANSSSKGLYIDSCYAHCQTETQETWFMADSPVLSKTKIAKAVGDWFYDRIPFQKIDCPYPCNPTCSNNGLNPRDNPEV

SEQ ID NO: 185 - DNA, 1359 bp, Ricinus communis
atgccgatgagagcatgcccatgttacatgtacctttcttcctccaaccacatatataagtatgccaataccacagaaagcaaagcatcagcacacgctatcccacaccagcaaattgacactggtcattcattcacaagaaaaatatacatttctgtcgcaggcacagatatgggtgatttatcaagatttggacaatggtgttattttttagtttatatgcttttactgctcaaaatagaaggagctagcattcctattactattgttgagactgctaaagctagaggagctgtttgtttggatggaagtccaccagcttatcactatgataagggatatggtactggtgccaacaactggattgttcacatggagggaggaggatggtgtgatgatcttgagagctgttctcaaagaaaggacacatacaaaggttcatcactaaaaatggagaagaccatgggtttctctggcatactagggggcaagcaatcagctaatcccgatttctacaactggaatagaattaagatcaagtactgtgatggatcatcctttactggcgatgttgaagtagttgatgctaaaactaaccttcacttcagaggagaaaggatttggcaagctgttattgatgatctattggcaaaagggatgagaaatgctcaaaatgccattctttccggttgttctgctggtggattggctgctattttgcattgcgacaaattccggtctctcctgcctgcaagtgctagagttaaatgtgtgtctgatgctggtttcttcattcatgggaaggatgtcgctggagggcgtcacattgagaacttcttcggaagcgtagttagattacacggatcggcaaagagcttacctgcatcatgcaccgcaaaaatgagacctgagttgtgtttcttcccacaatacgtagctcagactatgcgaacaccgctttttctcatcaattcagcctatgattcctggcagattaagaatgttttggcacccagcgctgttgataaaaagggaagctggaagagctgcaaactcgacttaaagaagtgctcagctgctcaacttcagactgtgcaagatttcaggacacaattcatcggtgccttgagtggtggggttaccaacaaaccagcaaatgggtatttcataaattcttgctatgcacactgccagtctggatcattggctacatggttggctgataagtctccagttgtgagcaatacgaaaattggaaaggcggttggagattggttttacgaccgagctacattccaaaagatcgattgtccttatccttgcaaccccacctgcgttaaaattgattctgattcataa

SEQ ID NO: 186 - protein, 452 aa, Ricinus communis
MPMRACPCYMYLSSSNHIYKYANTTESKASAHAIPHQQIDTGHSFTRKIYISVAGTDMGDLSRFGQWCYFLVYMLLLLKIEGASIPITIVETAKARGAVCLDGSPPAYHYDKGYGTGANNWIVHMEGGGWCDDLESCSQRKDTYKGSSLKMEKTMGFSGILGGKQSANPDFYNWNRIKIKYCDGSSFTGDVEVVDAKTNLHFRGERIWQAVIDDLLAKGMRNAQNAILSGCSAGGLAAILHCDKFRSLLPASARVKCVSDAGFFIHGKDVAGGRHIENFFGSVVRLHGSAKSLPASCTAKMRPELCFFPQYVAQTMRTPLFLINSAYDSWQIKNVLAPSAVDKKGSWKSCKLDLKKCSAAQLQTVQDFRTQFIGALSGGVTNKPANGYFINSCYAHCQSGSLATWLADKSPVVSNTKIGKAVGDWFYDRATFQKIDCPYPCNPTCVKIDSDS

SEQ ID NO: 187 - DNA, 1278 bp, Ricinus communis
atggcaaatccagcatatcgcacaattttaagccggagaaagtttgcaaagaaagattatgcgattggtggtataggattaaccgtcatcacattctgcgctttcgctcttctttccacttcaaacacccctcccgatctccagctcaccgccgccgccgcagccgacgatctcgttgacttaaccttacttcataatgcaaaagataaagacgcattatgtttagatggtagcttacctggttaccattttcaagaaggatttggatctggctccaaccgttggcttcttcacattgagggtggagggtggtgcgattcaatagaatcatgttcgcttcgcaaaacgacatccttgggatcttcaaaatatatgcaaagtccagttccttttgctggaatacttagcaagaatccttctcagaatcctgatttctataactggaataaagttaagatacgatattgtgatggcgcgtcttttgctggccatcctgaaaatgagttcaagaatggctcaaagctttatttcagaggggaattaatttgggaagcacttatggatcaacttttatcagcagggttgtctaatgccaaacaggctctgcttacaggatgttctgcaggagggttggcaacacttattcattgtgataactttcaagagcgtttgcctaaggacgctactgtcaaatgtcttgctgatgcaggttttttccttgatgagaaagatgttcttggaaattacacaatgagatctttctatcatgatgttgttgaccttcagggtgtagagaaaagtttgcacaagaactgtattggaagaatggactcagtcaagtgtcttttccctcaagaaatcattaaggatataaggaccccagttttcctagttaatccagcttatgatttttggcagatacaacacatcttggtaccagatggatcagatactcgtggctattggcgaaaatgcagaatgaatcttcgttattgtaatcctcatcagcttgaaatattacaaggtttccgtagttccttgctgaacgcactgaatgatttccagcaaaacaaggaaggagggctgttcataaattcttgctttattcactgtcaaacatggatggctgagacatggcattcaccaacttctccaagaatcaacaagaagacccttgcagagtcagtaggcgactggtattttaatcgtggagtagtgaagcaaattgactgcccttatccatgcaaccccacttgctacaacatgaaatttatttga

SEQ ID NO: 188 - protein, 425 aa, Ricinus communis
MANPAYRTILSRRKFAKKDYAIGGIGLTVITFCAFALLSTSNTPPDLQLTAAAAADDLVDLTLLHNAKDKDALCLDGSLPGYHFQEGFGSGSNRWLLHIEGGGWCDSIESCSLRKTTSLGSSKYMQSPVPFAGILSKNPSQNPDFYNWNKVKIRYCDGASFAGHPENEFKNGSKLYFRGELIWEALMDQLLSAGLSNAKQALLTGCSAGGLATLIHCDNFQERLPKDATVKCLADAGFFLDEKDVLGNYTMRSFYHDVVDLQGVEKSLHKNCIGRMDSVKCLFPQEIIKDIRTPVFLVNPAYDFWQIQHILVPDGSDTRGYWRKCRMNLRYCNPHQLEILQGFRSSLLNALNDFQQNKEGGLFINSCFIHCQTWMAETWHSPTSPRINKKTLAESVGDWYFNRGVVKQIDCPYPCNPTCYNMKFI

SEQ ID NO: 189 - DNA, 1176 bp, Arabidopsis lyrata subsp. lyrata
atggcgaggctaaagcaattgtggtcaagttttttggtgctggccgtggtggtgattggggccagagctgtgcccatcacatatcttgaatccgcggtagctaaaggagctgtgtgtttggatggtagcgcaccagcataccatttcgataagggatctggctcaggagcgaacaattggatcgttcatatggaaggaggaggatggtgcactgatatagctacatgcgtacaacgtaaaagtacaatgaagggttcttctaagcttatgaacaaagactttggtttctctggtatcttgggtggcaagcaaagcaccaatccagacttttacaattggaatagaatcaaagttcggtattgtgatggttcatctttcactggcgatattgaagctgttgatccgacgaacaagctgttctttcgcggtgctagggtttggcgggcagtgatcgatgatcttatggctaagggaatgagcaacgctcaaaacgcgatactctctggttgttcagctggagcattggctgcgattctacattgcgaccagttcaagtccatcctccccaaaacggctaaggtcaaatgtgtttctgacgccggttacttcatccacggtaaagatatcactggaggatcttacatccaatcgtactacgccaaagtcgtagcgacccacggatctgcaaagagtctacctgtttcttgcacctcaagtatgaagcccgagttgtgtttcttccctcaatacgttgctcagaccttgcaaacaccgcttttcgtcatcaatgctgctttcgattcttggcagatcaagaacgttttggcgccaacctctgttgataaaagcaaagcgtggaagacttgtaagcttgatcttaagaagtgtacggccgctcagcttcaaaccgttcaagggtatagagaccaagtgttggctgcgctggcaccggttcgatctgacacaacgagcggattgttcttagactcgtgccacgctcattgccaaggtggaagcgctgccacttggtccggcgatggaggtcctacagtggcgaatacgaaaatggctaaggctgttggagattggttctttgaaaggagtacttttcagaacatagactgttcatcgctgaattgcaaccctacttgtcctgcagtatctactgaagactaa

SEQ ID NO: 190 - protein, 391 aa, Arabidopsis lyrata subsp. lyrata
MARLKQLWSSFLVLAVVVIGARAVPITYLESAVAKGAVCLDGSAPAYHFDKGSGSGANNWIVHMEGGGWCTDIATCVQRKSTMKGSSKLMNKDFGFSGILGGKQSTNPDFYNWNRIKVRYCDGSSFTGDIEAVDPTNKLFFRGARVWRAVIDDLMAKGMSNAQNAILSGCSAGALAAILHCDQFKSILPKTAKVKCVSDAGYFIHGKDITGGSYIQSYYAKVVATHGSAKSLPVSCTSSMKPELCFFPQYVAQTLQTPLFVINAAFDSWQIKNVLAPTSVDKSKAWKTCKLDLKKCTAAQLQTVQGYRDQVLAALAPVRSDTTSGLFLDSCHAHCQGGSAATWSGDGGPTVANTKMAKAVGDWFFERSTFQNIDCSSLNCNPTCPAVSTED

SEQ ID NO: 191 - DNA, 1143 bp, Arabidopsis lyrata subsp. lyrata
atgaagacagaaggactctttgttaatattacatatgttagaaacgcagtcgcaaaaggggccgtttgtttggatggaagtccaccagcttatcatttagacagaggttctggaactggaatcaatagctggttgatacagcttgagggaggaggatggtgcaataatgtaacaaattgcgttagtcggatgcatactcgattaggttcatcgaagaaaatggtggagaaccttgctttctcagctattcttagcaataagaaacaatataatcctgatttttacaattggaatagagtgaaagttagatactgtgacgggtcatcattcacaggagatgtgcaagcagtgaaccctgctactaatcttcacttcagaggtgctcgagtttggcttgccgttatgcaagagctgctagctaaaggcatgataaacgccgagaatgctgttttgtctggatgttcagctggcgggttagcttcgctgatgcattgtgacagtttccgtgctctattaccgatgggaaccaaagtaaaatgtctttcagatgctggtttttttctcaacacaagagatgtctcaggagttcaatacattaaatcatacttcgaagatgtggttactcttcatggatcagcaaagaacttgccgaggtcatgcacatcaagattaactcctgcaatgtgtttctttccgcaatacgtggctcgccagattagaactcctctgttcattcttaatgctgcttacgactcttggcagataaagaacattttggctccgcgggcagctgatccttacggaaaatggcaaagttgtcaacttgacatcaagaattgtcatccaagccagatcaaagttatgcaagatttcaggttagagttcttgagtgcagtgataggtttagggaggtcttcatcaagaggaatgttcatagattcttgctacactcactgccaaaccgagacacaaacttcatggttctggcaagattctccaattctaaaccgaacgacaatagcaaaagctgttggagattgggtttatgacagaacattgtttcagaagatagattgtccttacccttgtaaccctacttgccaccacagggttttcactcctctagatgctcctccaatttaa

SEQ ID NO: 192 - protein, 380 aa, Arabidopsis lyrata subsp. lyrata
MKTEGLFVNITYVRNAVAKGAVCLDGSPPAYHLDRGSGTGINSWLIQLEGGGWCNNVTNCVSRMHTRLGSSKKMVENLAFSAILSNKKQYNPDFYNWNRVKVRYCDGSSFTGDVQAVNPATNLHFRGARVWLAVMQELLAKGMINAENAVLSGCSAGGLASLMHCDSFRALLPMGTKVKCLSDAGFFLNTRDVSGVQYIKSYFEDVVTLHGSAKNLPRSCTSRLTPAMCFFPQYVARQIRTPLFILNAAYDSWQIKNILAPRAADPYGKWQSCQLDIKNCHPSQIKVMQDFRLEFLSAVIGLGRSSSRGMFIDSCYTHCQTETQTSWFWQDSPILNRTTIAKAVGDWVYDRTLFQKIDCPYPCNPTCHHRVFTPLDAPPI

SEQ ID NO: 193 - DNA, 1176 bp, Arabidopsis lyrata subsp. lyrata
atggggaggcttaagcaatgttggtcaagtttgctagtgttggcagtggtggtgatcggaaccggagccgttcccatcacttatctacaaagcgccgttgccaaaggagccgtgtgtttggatgggagtgcaccagcttatcatttcgacaaagggtttggttcgggtgttaacaattggatcgtccacatggagggagggggatggtgtaccgacgtcgcttcatgtaatgaacgtaagggtacaatgaagggttcgtccaaattcatgaacaaagactttggattttccggtatcttgggtggcaagcaaagcactaacccagatttttacaattggaacagaatcaaagtacgatattgcgatggctcatcctttaccggcaatgtagaagccgttaatccggcgaataagctgttcttccgcggtgcccgagtttggcgtgcggtgattgatgatcttatggctaaaggaatgaaaaacgctcaaaacgcgatactctctggttgttcagccggagcattggccgcgattctacattgtgacactttccgtgccatacttccccgaacagctagcgtcaaatgtgtttctgatgccggttactttatccacggtaaagatatcacaggaggatcatacatcgaatcgtattacagcaaagtcgtcgcgcttcacggatctgcaaagagtcttcctgtttcttgcacctcaaaaatgaaaccagaactctgtttcttcccgcaatatgtggttccttccatgcgaacaccgctctttgtcatcaacgccgccttcgattcctggcagatcaagaacgttttggctcccactgctgttgataagggaaaacaatggaagaattgtaagcttgatctcaagaaatgtagtgccgctcagctcaaaaccgtccaagggtttagagatcagatgatgcgtgcattatcaccggttcacagtacaccgtcgagaggattgttcttagactcgtgtcacgctcattgccaaggaggaagcgccgcctcttggtccggtgacaaaggtccccaagtcgctaatacgagaattgcgaaagcagtcggaaactggttttatggccggagtgcatttcagaagatagactgtccgtcgccgacttgtaatcctacgtgtcctgcaatttcaactgaagactag

SEQ ID NO: 194 - protein, 391 aa, Arabidopsis lyrata subsp. lyrata
MGRLKQCWSSLLVLAVVVIGTGAVPITYLQSAVAKGAVCLDGSAPAYHFDKGFGSGVNNWIVHMEGGGWCTDVASCNERKGTMKGSSKFMNKDFGFSGILGGKQSTNPDFYNWNRIKVRYCDGSSFTGNVEAVNPANKLFFRGARVWRAVIDDLMAKGMKNAQNAILSGCSAGALAAILHCDTFRAILPRTASVKCVSDAGYFIHGKDITGGSYIESYYSKVVALHGSAKSLPVSCTSKMKPELCFFPQYVVPSMRTPLFVINAAFDSWQIKNVLAPTAVDKGKQWKNCKLDLKKCSAAQLKTVQGFRDQMMRALSPVHSTPSRGLFLDSCHAHCQGGSAASWSGDKGPQVANTRIAKAVGNWFYGRSAFQKIDCPSPTCNPTCPAISTED

SEQ ID NO: 195 - DNA, 1251 bp, Arabidopsis lyrata subsp. lyrata
atgaggaagcttttcttgttagggtttgtagttgcaggaatgattctggtgactgaagcaaaagggtattttgagttcaatgtcactgagttagatcacattgaagaattagagtttggtttctccaaatttagttccaatttcaatccattaatggttggtctcacacttatcagaggagctggttccaaaggagctgtttgtttggatggaacattgcctggatatcacttacatcgtggacatggatctggagacaatagctggctcattcaattagagggaggaggatggtgtgacaacataaggaactgtgtataccgaaagaagtcgcgtcgtggttcctctaactatatggagaaacagatacagtttacaggaatacttagtaataaagttcaagaaaatccagatttttttaactggaatagagttaagcttcgttattgcgatggtggttccttcagtggagatagtcagaacaaggctgcagggcttcagtttagaggagagaagatatggagagccgcaatggacgatttgaaagcaaagggaatgcgaaatgcgaaacaggcacttctatctggatgctctgcaggcgggctagcagtgattttacgctgtgacgaattcagaaacttgttttcaggaaataccagagtcaaatgcttaagtgatgcaggcttgttcttggacacgcccgatgtatccggtggccacacgataaggaacctatataacggcgttgtgcagttgcagggagtgaagaacaatttgccacatttatgcactaaccatctcaatccaacctcttgtttcttccctcaaaacttgatcagtcagatgaaaactcctctttttattgtcaatgcagcttatgatatttggcagattcaaagtagtatcgctccgccaagtgcagatcctagtggttattggcatgaatgcagattaaaccatggaagatgcaccccagcacagatccggttcttgcaagggtttagaaatcaaatgttgagagctgtgaggggtttttcgaatttgaaaaagaacggtttgtttatcaattcttgttttgctcattgccaaaccgaaagacaagacacttggttcgccgatgattctcctgttatccacaaaatggctgttgcgatagcggttggagattggtattttgatagagctgaagtgaagctaatagattgtccatatccgtgtgataggagttgccacaatctggtcttcagatga

SEQ ID NO: 196 - protein, 416 aa, Arabidopsis lyrata subsp. lyrata
MRKLFLLGFVVAGMILVTEAKGYFEFNVTELDHIEELEFGFSKFSSNFNPLMVGLTLIRGAGSKGAVCLDGTLPGYHLHRGHGSGDNSWLIQLEGGGWCDNIRNCVYRKKSRRGSSNYMEKQIQFTGILSNKVQENPDFFNWNRVKLRYCDGGSFSGDSQNKAAGLQFRGEKIWRAAMDDLKAKGMRNAKQALLSGCSAGGLAVILRCDEFRNLFSGNTRVKCLSDAGLFLDTPDVSGGHTIRNLYNGVVQLQGVKNNLPHLCTNHLNPTSCFFPQNLISQMKTPLFIVNAAYDIWQIQSSIAPPSADPSGYWHECRLNHGRCTPAQIRFLQGFRNQMLRAVRGFSNLKKNGLFINSCFAHCQTERQDTWFADDSPVIHKMAVAIAVGDWYFDRAEVKLIDCPYPCDRSCHNLVFR

SEQ ID NO: 197 - DNA, 1260 bp, Arabidopsis lyrata subsp. lyrata
atgaaaagcgtgttgttgtgggttgcggtggtcgtgtgcttgctatgttcagtcacggcggtgattcggagcggatctagcgatggatttgggaaacccatagatactgatactgcgatatctttgctggagtataaattgatggcgccttcggttccaatggtacctctcaccttgattcgaggagctgactctaaaggagctgtgtgcttagatgggacactacctggttatcatttagatcgtggttttggatcaggtgctaacagttggcttatccagcttgagggtggaggatggtgtaacaaccataggagctgtgtttatcgcaaaacaagtcggcgtggttcctctaaattcatggaaaaagctttggccttcactggaattttgagcaataaatctgaagagaatcctgacttctttaattggaacaggatcaagttgcgctactgtgatggtgcgtctttctctggcgatagtcaggacgagagttctcaacttttctatcgaggacaacgaatctggcaagtggctatggaagaattcctgtctttaggaatgaagcaagcaaaccaggctctgctttctggatgttcagctggaggattagcttccattttgcactgtgatgagttcagggaactattacctagttccacgaaagtaaaatgcttaagtgacgctggaatgtttctggatgcagtagatgtctctggtggccactcacttaggaatatgttccaaggtgttgttacagtgcagaacctccaaaaggacttgtccagtacttgtacaaaccatttggatcctacttcgtgcttctttccacagaacctggtttcagacattaaaaccccaatgtttcttctcaacacagcatatgactcttggcagatccaagagagcttagctcctccaactgctgatccaggtggcatctggaaggcatgcaaatcagatcactcgcgatgtaattcatcgcagatccaatttttcgaagaattcaggacccaaatggtgcttgctgtaaactcattttcaaactctgaccagaacggtctttatataaactcttgcttcgcccattgtcagacagaaagacaggacacttggtttgctcaagattctcctcaactaaacggaaagagagtagcagagtctgtaggtgactggtacttcgaccgggcaaacaatgtcaaagccatcgactgtccttacccgtgtgacacaacatgtcacaatctgattttcgagtga

SEQ ID NO: 198 - protein, 419 aa, Arabidopsis lyrata subsp. lyrata
MKSVLLWVAVVVCLLCSVTAVIRSGSSDGFGKPIDTDTAISLLEYKLMAPSVPMVPLTLIRGADSKGAVCLDGTLPGYHLDRGFGSGANSWLIQLEGGGWCNNHRSCVYRKTSRRGSSKFMEKALAFTGILSNKSEENPDFFNWNRIKLRYCDGASFSGDSQDESSQLFYRGQRIWQVAMEEFLSLGMKQANQALLSGCSAGGLASILHCDEFRELLPSSTKVKCLSDAGMFLDAVDVSGGHSLRNMFQGVVTVQNLQKDLSSTCTNHLDPTSCFFPQNLVSDIKTPMFLLNTAYDSWQIQESLAPPTADPGGIWKACKSDHSRCNSSQIQFFEEFRTQMVLAVNSFSNSDQNGLYINSCFAHCQTERQDTWFAQDSPQLNGKRVAESVGDWYFDRANNVKAIDCPYPCDTTCHNLIFE

SEQ ID NO: 199 - DNA, 876 bp, Arabidopsis lyrata subsp. lyrata
atggatttgggaactcgagcgagagatactgagactgcgatatcttttctggagtataaattgatggcgccttcggttccaatggtgcctctcactttgattgagggagctgactctaaaggagctgtgtgcttagatgggacgctacctggttatcatttagatcgtggttttggatcaggtgctaacagttggcctatccaccttgagggtggaggatggtgtaacaaccataggagctgtgtatatcgcaaaacaagtccgcgtggttcttctaagttcatggaaaaagctttgcccttcactggaatattgagcaataaacctgaagagaatcctgacttctttcattggaacaggatcaagttgcgctactgtgatggtgcgtctttctctggtgatagtcaggacgagagttcgcaaattttctatcgaggacaacgaatctggcaaatggctatggaagaattcctgtctttaggcatgaagcaagcaaaccaggctctgctttctggatgttcagctggaggattagcttccatcttgcactgtgatgagtacatggaactattacctagttccaggaaagtaaaatgcttaagtgacgctggaatgtttcttgacgcagtggatgtctctgggggccactcgcttaggaatatgttccaaggtgttgttacagtgcagaacctccaaaaggacttgtccagtacttgtacaaaccatttggatcctacttcgtgcttctttcctcagaacttggtttcagacatcaaaaccccaatgtttcttctcaacacagcatatgactcgtggcagatccaagagagcttagctcctccaactgctgatccagatccaattcttccaacgtga

SEQ ID NO: 200 - protein, 291 aa, Arabidopsis lyrata subsp. lyrata
MDLGTRARDTETAISFLEYKLMAPSVPMVPLTLIEGADSKGAVCLDGTLPGYHLDRGFGSGANSWPIHLEGGGWCNNHRSCVYRKTSPRGSSKFMEKALPFTGILSNKPEENPDFFHWNRIKLRYCDGASFSGDSQDESSQIFYRGQRIWQMAMEEFLSLGMKQANQALLSGCSAGGLASILHCDEYMELLPSSRKVKCLSDAGMFLDAVDVSGGHSLRNMFQGVVTVQNLQKDLSSTCTNHLDPTSCFFPQNLVSDIKTPMFLLNTAYDSWQIQESLAPPTADPDPILPT

SEQ ID NO: 201 - DNA, 1056 bp, Arabidopsis lyrata subsp. lyrata
atggcgccttcggttccaatggtgcctctcactttgattgagggagctgactctaaaggagctgtgtgcttagatgggacgctacctggttatcatttagatcgtggttttggatcaggtgctaacagttggcctatccaccttgagggtggaggatggtgtaacaaccataggagctgtgtatatcgcaaaacaagtccgcgtggttcttctaagttcatggaaaaagctttgcccttcactggaatattgagcaataaacctgaagagaatcctgacttctttaattggaacaggatcaagttgcgctactgtgatggtgcgtctttctctggtgatagtcaggacgagagttcacaaattttctatcgaggacaacgaatctggcaagtggctatggaagaattcctgtctttaggcatgaagcaagcaaaccaggctctgctttctggatgttcagctggaggattagcttccatcttgcactgtgatgagtacagggaactattacctagttccaggaaagtaaaatgcttaagtgacgctggaatgtttcttgacgcagtggatgtctctgggggccactcgcttaggaatatgttccaaggtgttgttacagtgcagaacctccaaaaggacttttccagtacttgtacaaaccatttggatcctacttcgtgcttctttcctcagaacttggtttcagacatcaaaaccccaatgtttcttctcaacacagcatatgactcgtggcagatccaacagagcttagctcctccaactgctgatccagatcaattcttccaacaattcaggacccaaatggtgcttgctgtaaacgcattctcaaactctgaccagaccggcggtctttatataaactcttgctttgcgcatagtcagactgaaagacatgacacttggtttgctcaagattctcctcgactaaacggaaagataacattactcttccaaaactgttcatacggtttcaccaatggaagaaatacggatacaagggttcctctttccatcgtattattaaggatttcatga

SEQ ID NO: 202 - protein, 351 aa, Arabidopsis lyrata subsp. lyrata
MAPSVPMVPLTLIEGADSKGAVCLDGTLPGYHLDRGFGSGANSWPIHLEGGGWCNNHRSCVYRKTSPRGSSKFMEKALPFTGILSNKPEENPDFFNWNRIKLRYCDGASFSGDSQDESSQIFYRGQRIWQVAMEEFLSLGMKQANQALLSGCSAGGLASILHCDEYRELLPSSRKVKCLSDAGMFLDAVDVSGGHSLRNMFQGVVTVQNLQKDFSSTCTNHLDPTSCFFPQNLVSDIKTPMFLLNTAYDSWQIQQSLAPPTADPDQFFQQFRTQMVLAVNAFSNSDQTGGLYINSCFAHSQTERHDTWFAQDSPRLNGKITLLFQNCSYGFTNGRNTDTRVPLSIVLLRIS

SEQ ID NO: 203 - DNA, 1254 bp, Arabidopsis lyrata subsp. lyrata
atgaagagtgtgttgcagattgcggcggcgatatcctggctttgtatggtggtaggtgtgattgggagtgatggaatcgggaatgtgagagatacagacgatgagatctcgttactcgaaagtcaattggtggtgacatctccgtcgcagcttcttatggtgcctctcactttgattcaggctgctgcctccaaaggagctgtgtgcctggatggaacactacccggttatcatctacaccctggttctggatcaggagctaaccggtggctgatccaactcgagggtggaggatggtgcaacacacgtaggagctgtatcttccggaaaaccactcgccgtggttcatcaaatcatatggagaaagttttagccttcactggaatattgagcaataaagctaatgagaatcctgacttcttcaactggaacagagtcaaactgcgttactgcgatggtgcctctttcacaggcgatagtcaggatcagagctcacaactttactatagaggacaacgaatttggcaagcagcaatggaagaactactgtctaaaggcatgcaaaaagcagagcaggctctactttctggatgttcagctgggggattagcttccattctacactgcgatcagttcaaggaacttttaccgggtacaaccaaagtgaaatgcttaagtgatgctggaatgtttatggatgcagtggatgtctctggaggccactctctccggaagatgtttcaaggtgttgttacaatacagaacctccaaaaggaactctccactacctgtacaaagcatttggatccaacttcgtgcttctttccccagaacttggtttcaggcattaagactccaatgtttcttctcaatgcagcatatgacgcttggcaggtacaagagagtttagctccaccatctgttgacctaagcggctcttggaaggcatgcaaatctgatcactcgcattgtaattcatctcagatccaattcttccaagacttcaggacatcaatggtggatgctgtaaagtctttcgcgacatcgacccataacggtgtgttcataaactcatgcttcgcacactgccaatccgaaagacaggacacttggtatgcaccagattctcctacacttcatgccaagacggttgctgaatctgttggtgattggtactttgaccgaacaactgtcaaagccattgactgtccttacccttgtgacaaaacatgtcacaatcttattttcaagtga

SEQ ID NO: 204 - protein, 417 aa, Arabidopsis lyrata subsp. lyrata
MKSVLQIAAAISWLCMVVGVIGSDGIGNVRDTDDEISLLESQLVVTSPSQLLMVPLTLIQAAASKGAVCLDGTLPGYHLHPGSGSGANRWLIQLEGGGWCNTRRSCIFRKTTRRGSSNHMEKVLAFTGILSNKANENPDFFNWNRVKLRYCDGASFTGDSQDQSSQLYYRGQRIWQAAMEELLSKGMQKAEQALLSGCSAGGLASILHCDQFKELLPGTTKVKCLSDAGMFMDAVDVSGGHSLRKMFQGVVTIQNLQKELSTTCTKHLDPTSCFFPQNLVSGIKTPMFLLNAAYDAWQVQESLAPPSVDLSGSWKACKSDHSHCNSSQIQFFQDFRTSMVDAVKSFATSTHNGVFINSCFAHCQSERQDTWYAPDSPTLHAKTVAESVGDWYFDRTTVKAIDCPYPCDKTCHNLIFK

SEQ ID NO: 205 - DNA, 1248 bp, Arabidopsis lyrata subsp. lyrata
atggagaagcttttggtagtaggatttgttgtggctgggataatactgggaactcaagcatatgaatatttagatttcaatgtgacagaaatagatcgcattgaggaattagagtttggattctccaaatatagctccaatctaaaccctttaatggttggcctcacccttatcagaggagctgattctggagctgtttgtttggatggaacattgcctggatatcacttgcaccgtggacatggatctggagctaatagctggctcattcagttggagggaggaggatggtgcaacaacatcaggacctgtgtataccggaagacgactcgacgtggttcctctaattatatggagaaacagcttcagtttacaggaatactgagtgacaaagctcaagaaaatcctgacttcttcaactggaatagagttaagcttcgttactgtgatggtgcttctttcagtggagatggccagaatcaggctgcacagcttcagtttagaggagagcgcatctggagagcggcaatagatgatttgaaggcgaatggaatgcgatatgccaaccaggcacttctctctgggtgctctgctggtggtttagcagcaatcttgcgctgcgatgagtttaggaacttgttccctggatcaaccaaagtcaagtgcttgagtgatgcaggcttgttcttggacacagccgatgtttcaggcggccgcacaatcaggaacttatacaatggtgtcgtagaattgcagagtgtgaagaacaatcttccacgtatatgcacaaaccatctcgatccaacctcgtgtttcttcccacaaaatctgatcagtcagatgaaaactccactttttatcgtcaacgcagcatatgatacatggcagattcaaagcagtatagctccaacatcagctgatcctagtggattttggcatgactgcagactaaaccatggcaaatgtactcctgcacaattgagattcttgcaaggattcagggaccagatgcttagagtagttaggggcttctcaatgtctagacagaatggattgttcatcaactcttgctttgctcactgccaaaccgagaggcaagatacttggtttgccgatgattctcccgtcatcaggaaaaaggcggtggcaatagctgtaggagattggtatttcgatagagcggaagtgaagttagtcgattgcccgtacccgtgtgacaagagctgccacaacttggtgttcagatga

SEQ ID NO: 206 - protein, 415 aa, Arabidopsis lyrata subsp. lyrata
MEKLLVVGFVVAGIILGTQAYEYLDFNVTEIDRIEELEFGFSKYSSNLNPLMVGLTLIRGADSGAVCLDGTLPGYHLHRGHGSGANSWLIQLEGGGWCNNIRTCVYRKTTRRGSSNYMEKQLQFTGILSDKAQENPDFFNWNRVKLRYCDGASFSGDGQNQAAQLQFRGERIWRAAIDDLKANGMRYANQALLSGCSAGGLAAILRCDEFRNLFPGSTKVKCLSDAGLFLDTADVSGGRTIRNLYNGVVELQSVKNNLPRICTNHLDPTSCFFPQNLISQMKTPLFIVNAAYDTWQIQSSIAPTSADPSGFWHDCRLNHGKCTPAQLRFLQGFRDQMLRVVRGFSMSRQNGLFINSCFAHCQTERQDTWFADDSPVIRKKAVAIAVGDWYFDRAEVKLVDCPYPCDKSCHNLVFR

SEQ ID NO: 207 - DNA, 1284 bp, Arabidopsis lyrata subsp. lyrata
atggcgattccaaggtttagctctctgttacggtgtagaaaatgggctaagagtgactggcttgtcgcttctatcggattcgtattgattgtttttttcctctctttcttcatcgatcccacttcagactctgtcccctccgttgaccgatctcggccaatcatattccctagcgatctggtcaaactgaagttgtcgagtatagctaaagagagaggagctttttgtttggatggaagcttgcctgggtaccattttcatgagggttctggatctggctcccaaagctggcttgttcatttggagggtggaggctggtgcaacacagttgcgtcatgttctgctcgagcattgactaaattaggttcttccaactactttgaacaagaagtggcctttcaaggtgttttaagcagtgacccatctcaaaatcctgaattctttaactggaacaaggttgcgataaggtactgtgatggtgcttcttttgctggacaccctgaagctgaattcaagaatgaaacccggcttttcttccggggtcagctcatttgggaagctattattgatgaactgttgtcgatgggcatgtcagatgcgaaacaggccatacttacaggatgttctgctggtggcttggcaagtcttatacattgtgactactttcgagatcatcttccaaaagatgcagctgtcaaatgtgtttctgatggaggctactttctcaacgtgccagatgtccttggaaacccaacaatgaggtctttctatcatgatgttgctaatttgcagggtgtagataagagcttggatcagaaatgtgaagccaaaacaaagccatctaagtgtatgtttcctcaagaattcctgaaaaacataagaactccagtatttcttgtgaacccagcctacgatttttggcagattcaaaatgtcttggtaccaacttctgcggatccagataaaagttgggcaaagtgcagactcaatattaaggaatgtgatgccgcacagatgaaagttctacacggttttcgcagttctatgatggatgcgattggggaatttcatcagagcaaagatggtggcatgttcatagattcctgctatgctcattgccagacagtcatgtcagtgacatggcactccccaacctcaccaagaatcgaaaataagacgatcgcagaatctgtaggtgactggtacttcaaccgaaaaccggtgaagctaattgattgtccttacccatgcaatccttcttgttacaacatgaatttcacctga

SEQ ID NO: 208 - protein, 427 aa, Arabidopsis lyrata subsp. lyrata
MAIPRFSSLLRCRKWAKSDWLVASIGFVLIVFFLSFFIDPTSDSVPSVDRSRPIIFPSDLVKLKLSSIAKERGAFCLDGSLPGYHFHEGSGSGSQSWLVHLEGGGWCNTVASCSARALTKLGSSNYFEQEVAFQGVLSSDPSQNPEFFNWNKVAIRYCDGASFAGHPEAEFKNETRLFFRGQLIWEAIIDELLSMGMSDAKQAILTGCSAGGLASLIHCDYFRDHLPKDAAVKCVSDGGYFLNVPDVLGNPTMRSFYHDVANLQGVDKSLDQKCEAKTKPSKCMFPQEFLKNIRTPVFLVNPAYDFWQIQNVLVPTSADPDKSWAKCRLNIKECDAAQMKVLHGFRSSMMDAIGEFHQSKDGGMFIDSCYAHCQTVMSVTWHSPTSPRIENKTIAESVGDWYFNRKPVKLIDCPYPCNPSCYNMNFT

SEQ ID NO: 209 - DNA, 1092 bp, Arabidopsis lyrata subsp. lyrata
atggacatgttcaacgatttcaatggaacaaatgcaaatgtcctgatggtaggactcactctcgtccaagccgctgctgctaaaggagcggtgtgtctggatgggtcagtgcctggatatcatttgtatcgcgggtatggttcaggagctaacaactggatcattcagttgcagggaggtgcatggtgtgacagcatacaaaattgtcagaaccgtaaaaggagtggttatggatcatctaccttaatggagaaagaggtggcgtttttaggattactaagcaataaagcggctgaaaatccagacttttacaattggaacaaagtaaaagtccggtattgtgatggtgcatcctttggcggtgatagcgaaaacaaggcggcgcaacttcagtttagaggaaagcgtatatttttagctgtcatggaagatttgatggcacagggaatgcgtcaggcaaaacaggctttgctcaacggatgttctgccgggggtctttcagcgattttacgatgcgatgatttcagtaatttgtttcctcctaccaccaaagtaaaatgcatgagcgatgctggcttcttcctcgacgccgttgatgtatctggaggtcattctttaaggcgtatgtattctggtgtcgtgaacactcagggtttgcaaaacactcttcctcccacttgtacaagccatattaaaccaactttgtgttttttccctcaatacataatcaaccaagtcaagaccccgttgtttattctcaactcgggatttgattcgtggcagattggaaatagtttagctccaccatctgctgatccaaatggtagttggcgtaactgcagctccagcttcaggtgcactgcctctcagaagcagttcttggatggtttcaagatgagcatgttaaatgcggtgaagaccttttccaagtttagcaagaacggagtgttaattacctctggatgggctcattgtcaagcggagagacaagatacttggtttcctggaaactctggtgcgggtaaagttaaggggattgctgtggctgttggagattggtatttcgaaagaataaaaaagaaaagctcatag

SEQ ID NO: 210 - protein, 363 aa, Arabidopsis lyrata subsp. lyrata
MDMFNDFNGTNANVLMVGLTLVQAAAAKGAVCLDGSVPGYHLYRGYGSGANNWIIQLQGGAWCDSIQNCQNRKRSGYGSSTLMEKEVAFLGLLSNKAAENPDFYNWNKVKVRYCDGASFGGDSENKAAQLQFRGKRIFLAVMEDLMAQGMRQAKQALLNGCSAGGLSAILRCDDFSNLFPPTTKVKCMSDAGFFLDAVDVSGGHSLRRMYSGVVNTQGLQNTLPPTCTSHIKPTLCFFPQYIINQVKTPLFILNSGFDSWQIGNSLAPPSADPNGSWRNCSSSFRCTASQKQFLDGFKMSMLNAVKTFSKFSKNGVLITSGWAHCQAERQDTWFPGNSGAGKVKGIAVAVGDWYFERIKKKSS

SEQ ID NO: 211 - DNA, 1251 bp, Arabidopsis lyrata subsp. lyrata
atgaagaagcttctatggattgggctcattctcttaaacatccatgtaaatgggatgatgatggagtttgatgatatggagtggtacacagatttcaatggaacaaagatgtttgatacagaaaatgatgttttttctgaagctaagtttcctatggttggactcactctgattcaatctgctgctgctaaaggagctgtttgtttagatggaagtcttcccggatatcacttgcatcgcgggtttggttcaggagcaagcaattggcttgttcaattggagggaggtggatggtgtgataccgttagaaattgtgtataccgtaaaaccagtcgtcgtggatcttcttcatatatggagaaagagataccatttaccggcattctaagtaatcaagccgcggaaaatccagacttttataactggaatagagtaaaagttcggtattgtgacggtggatcgtttagcggggacagcgaaaataaggcagcacaacttcagtttagaggaatgagaatatggttagctgctatggaagatttgatggcaaaaggaatgcgtcaagctaagcaggctctactctctggatgttctgctggaggtcttgcggtgattttacgatgtgatgatttcgggaaattgtttcctccttccaccagagtgaaatgtctgagtgacgctggtttcttcctcgatgccatcgatgtgtctggaggtcgatctcttaggcggttatacgccggtgtggtcaaattacagaatctgcaaaccaagcttcctcaggattgtgtgaaccgtcttaatccaacttcgtgttttttcccacaaaacttaatcaaccaagtcaagactccactttttattctaaatgctgcatatgattcatggcagatccaagagagtttagctccaaaatccgcagatccaagtggaagttggaatgattgtagacttaactacgccaagtgcactgcatctcagatccaattcttgcaaggttttaggacgcatatggtgaatttggtaaagggttttgcgatgccaagtaagaacggtgtgttcctcaattcgtgctttgctcattgccaaacagagaggcatgacacatggttcgccaaaaactctcctgcggttaagaacaagggtatagcagtagctgtgggagattggtatttcgaaagaggaggagcaaagctcatagactgtgcttatccttgtgacaagacttgtcacaatttggtctttagatga

SEQ ID NO: 212 - protein, 416 aa, Arabidopsis lyrata subsp. lyrata
MKKLLWIGLILLNIHVNGMMMEFDDMEWYTDFNGTKMFDTENDVFSEAKFPMVGLTLIQSAAAKGAVCLDGSLPGYHLHRGFGSGASNWLVQLEGGGWCDTVRNCVYRKTSRRGSSSYMEKEIPFTGILSNQAAENPDFYNWNRVKVRYCDGGSFSGDSENKAAQLQFRGMRIWLAAMEDLMAKGMRQAKQALLSGCSAGGLAVILRCDDFGKLFPPSTRVKCLSDAGFFLDAIDVSGGRSLRRLYAGVVKLQNLQTKLPQDCVNRLNPTSCFFPQNLINQVKTPLFILNAAYDSWQIQESLAPKSADPSGSWNDCRLNYAKCTASQIQFLQGFRTHMVNLVKGFAMPSKNGVFLNSCFAHCQTERHDTWFAKNSPAVKNKGIAVAVGDWYFERGGAKLIDCAYPCDKTCHNLVFR

SEQ ID NO: 213 - DNA, 1047 bp, Selaginella moellendorffii
atgaattctcttgcagtttgcttggatgggagcgccccagcatatcatttgaggcctggttttggctctggtgcgaagaactggcatatacgtttggaaggtggaggctggtgtgaaagctcatccgcttgtgccactcgagccaagacaagtcatggaagctccaagctcatgtccaatcaaatattatttaatggtattcttagcaacaagtattctgtcaatccagatttctacaactggaaccatgtatatgtgcgttattgtgatggaggatctttcagtgccgatgttgctgttccagctctatattttcgaggactcagaatttttagagctgttgtgaagcacctgcaaaccaagggactgagcactgctaaacaggcacttttaagtgggtgctctgctggaggacttggagttgttcatcgttgtaacgagttcaaatatcttctacctaatgccaacgttaaatgtttgagtgatgctggttactttgtgaatggccaaagcatccgaggaaactttgccatgtacaactattacaaaggagtggtgaatttacagaaattgcaaaacaccctggctagagcttgtacctcggcaaaagatccagtgcagtgtttctttccacaacaagcacagggctacataagacagcccacgttttttgttaatgcagcatatgataattggcagcttgaaaatgtaaaagagatttcctggagacaatacagcccttgcatgagatttgcttcttgtttccatgcaaaaactttgcaagcattccgacaaaatctactgaatggtctcttctatgctcaatctagagcaggctggggaacctttatcgattcttgctttagccattgtcaacttgaggtagacatcaaatggacaagaccaagaatacatggaaagtcattagcaaaagctgtaggagattggtattttggaagatctcagtcaactcactatatagattgtggatttccaacttgcaatcctacttgcgttaagtaccctctaatgtcaacttccacatag

SEQ ID NO: 214 - protein, 348 aa, Selaginella moellendorffii
MNSLAVCLDGSAPAYHLRPGFGSGAKNWHIRLEGGGWCESSSACATRAKTSHGSSKLMSNQILFNGILSNKYSVNPDFYNWNHVYVRYCDGGSFSADVAVPALYFRGLRIFRAVVKHLQTKGLSTAKQALLSGCSAGGLGVVHRCNEFKYLLPNANVKCLSDAGYFVNGQSIRGNFAMYNYYKGVVNLQKLQNTLARACTSAKDPVQCFFPQQAQGYIRQPTFFVNAAYDNWQLENVKEISWRQYSPCMRFASCFHAKTLQAFRQNLLNGLFYAQSRAGWGTFIDSCFSHCQLEVDIKWTRPRIHGKSLAKAVGDWYFGRSQSTHYIDCGFPTCNPTCVKYPLMSTST

SEQ ID NO: 215 - DNA, 1128 bp, Selaginella moellendorffii
atgttcttccaagttctctcgcttcatgcgtttccagttattgtacatgccgttctggttccaataacttatctagctgcgtccaattcgtcaggagcggtttgcctggatggaagcgttccggcttatcatcttctaccgggagcctcaaactcatggcatatttctttggagggtggaggatggtgtgactccgtggtatcctgtgctaaccgcgccaaaggtcactggggaagctccatttacatgcaaagcccgactggattcgcaggctcgctcagcaacgacgcttccgtaaacccggactttttcaactggacacaagtgttcgtcaggtactgcgatggagcttctttcactgctgatgtcgaggagcccctcgttttgtactttcgagggaagaggattctcagagcagtcattgatgacttgagaagcaaaggattgagcaacgcgacacaggttcttctatcgggctgctcggctggagggctttcgactatactccattgcaacgatgtccagagcctcctcgatccaggcgtgacactgaaatgcttgagtgatgctgggttcttcataaacacttccgatcctggtggtcactacctcatgtcaaagctttacaaggacgtggtcagcttacacaagctcgaaaacacgctggatcaatcctgcattggtgactcaaacggtgatgctacgaagtgtttctttcctgagatcatgaaagcttacgtcaaaccaccattgttcttgttgaatgctgcttacgattcctggcaactcgagcacggccttaatctttcgagggactcatacaactcttgcatcagctactcgtcatgcccaccagttgaactcctccaaggatttcgagcaagcatgctggatgctctttcaggtggatggagctcgctggctctttacatcaacgcatgcttcacgcactgccaagcaacctgggatgcgacttggaacatccccaagatcaatgacaaggcaagtctcccctgtcgctctccagcgcaaagtgttggcgactggtacttcgagaggactgcccagccggaacaagctattgattgtgcgtatccctgtaatccaacttgcatccagcaagcttaa

SEQ ID NO: 216 - protein, 375 aa, Selaginella moellendorffii
MFFQVLSLHAFPVIVHAVLVPITYLAASNSSGAVCLDGSVPAYHLLPGASNSWHISLEGGGWCDSVVSCANRAKGHWGSSIYMQSPTGFAGSLSNDASVNPDFFNWTQVFVRYCDGASFTADVEEPLVLYFRGKRILRAVIDDLRSKGLSNATQVLLSGCSAGGLSTILHCNDVQSLLDPGVTLKCLSDAGFFINTSDPGGHYLMSKLYKDVVSLHKLENTLDQSCIGDSNGDATKCFFPEIMKAYVKPPLFLLNAAYDSWQLEHGLNLSRDSYNSCISYSSCPPVELLQGFRASMLDALSGGWSSLALYINACFTHCQATWDATWNIPKINDKASLPCRSPAQSVGDWYFERTAQPEQAIDCAYPCNPTCIQQA

SEQ ID NO: 217 - DNA, 1248 bp, Selaginella moellendorffii
atgggaactagcagcgcacaaaattcgatgctccagtctcgcctagctttagctgctcttcttcttcttcttcttgtccagagcacttacagcgcgtttgaattgacaccggacgttccaccgatccaacaccaccatcgcaaggccggggacgggcaactttgggtgggaattacgatcgtttccagcgctttggcctcggcaactggaggcgtatgcttggatgggagtgctcctgcctatcatctcctcaaaggctctggaagtggcgcgaacagctggcatttacatctagagggtggagcttggtgcgaatcgatcgagaagtgcgtcgagagggcatctacgaatctgggaagctccagcaagatggagacctcaatccctttcacgggccttctcaataacaattacaacgtcaacccagacttctataactggaatcacgtctacgtaagatactgcgatggatcatcgttcaacagtgacgtagcaaatccttacaagacttcttctggtcagacgctgtatttcagaggaagaaaagcttttaaagcgatcatagatgatctcaagtctcaaggtcttggcaatgcagaccaggcatttctcactggatgctcggccggaggactgtcaacgattcaccgttgcaatgactttcagtactatctccctgggatcaaagtcaagtgcttgagcgatggtggcttctttctcaacgcgccggataccagcggcaactatgcactgtatagtttttataatggagttgtcaacacacatagcttgaaagatacactgcctagctcttgcatctcatcaaaagatgcaacccagtgcttttttccacaaaacatgcaaaactacgttggaccgcccttgttcttcgtcaacggtgcctacgacttttggcagctagagaatgtcaagagattgtcgagagatcaatacagctcctgtgtagatcactcggcgtgcccaaacgtaaatgttctgcaagggttcaggcaaagcatgctcgacgcgctctccatctcgcgctcccggggatcgtcggggatgttcatcgattcctgcttcagtcactgccaagttcaaggggatgacaagtggaacaatcccaaagtcaatggcctgtcaactgcaaaaactgtgggtgattggtactttggccgttcgtcgtcgtccatacacatcgactgtgcatacccttgcaatccaacttgtgtcacaaggctcgattga

SEQ ID NO: 218 - protein, 415 aa, Selaginella moellendorffii
MGTSSAQNSMLQSRLALAALLLLLLVQSTYSAFELTPDVPPIQHHHRKAGDGQLWVGITIVSSALASATGGVCLDGSAPAYHLLKGSGSGANSWHLHLEGGAWCESIEKCVERASTNLGSSSKMETSIPFTGLLNNNYNVNPDFYNWNHVYVRYCDGSSFNSDVANPYKTSSGQTLYFRGRKAFKAIIDDLKSQGLGNADQAFLTGCSAGGLSTIHRCNDFQYYLPGIKVKCLSDGGFFLNAPDTSGNYALYSFYNGVVNTHSLKDTLPSSCISSKDATQCFFPQNMQNYVGPPLFFVNGAYDFWQLENVKRLSRDQYSSCVDHSACPNVNVLQGFRQSMLDALSISRSRGSSGMFIDSCFSHCQVQGDDKWNNPKVNGLSTAKTVGDWYFGRSSSSIHIDCAYPCNPTCVTRLD

SEQ ID NO: 219 - DNA, 1089 bp, Selaginella moellendorffii
atgaattctcttgcagtttgcttggatgggagcgccccagcatatcatttgaggcctggttttggctctggagcgaagaactggcatatacgtttggaaggtggaggctggtgtgaaagctcatccgcttgtgccactcgagccaagacaagtcatggaagctcgaaactcatgtccaatcaaatattatttaatggtattcttagcaacaagtattctgccaatccagatttctacaactggaaccatgtatatgtgcgttattgtgatggaggatctttcagtgcagatgttgctgctctatattttcgaggactcagaatttttagagctgttgtgaagcacctgcaaaccaagggactgagcactgctaaacaggcacttttaagtgggtgttctgctggaggacttggagttgttcatcgttgtaacgagttcaaatatcttctacctaatgccaacgttaaatgtttgagtgatgctggttactttgtgaatggccaaagcatcagaggaaactttgccatgtacaactattacaaaggagtggtgaatttacagaaattgcaaaacactctggctagagcttgtacctcggcaaaagatccagtgcagtgtttctttccacaacaagcacagggctacataagacagcccacgttttttgttaatgcagcatatgataattggcaggtaattctccttttaatttcaaacttattattcaacaaatttctacagcttgaaaatgtaaaagagatttcctggaggcaatacagcccttgcatgaaatcttctttttgtttccatgcaaaaactttgcaagcattccgacaaaatctgctgaatggtctcttctatgctcaatctagagcaggctggggaacctttatcgattcttgctttagccattgtcaacttgaggtagacatcaaatggacaagaccaagaatacatggaaagtcattagcaaaagctgtaggagattggtattttggaagatctcagtcaactcactatatagattgtggatttccaacttgcaatcctacttgcgttaaataccctctaatgtcaacgtccacatag

SEQ ID NO: 220 - protein, 362 aa, Selaginella moellendorffii
MNSLAVCLDGSAPAYHLRPGFGSGAKNWHIRLEGGGWCESSSACATRAKTSHGSSKLMSNQILFNGILSNKYSANPDFYNWNHVYVRYCDGGSFSADVAALYFRGLRIFRAVVKHLQTKGLSTAKQALLSGCSAGGLGVVHRCNEFKYLLPNANVKCLSDAGYFVNGQSIRGNFAMYNYYKGVVNLQKLQNTLARACTSAKDPVQCFFPQQAQGYIRQPTFFVNAAYDNWQVILLLISNLLFNKFLQLENVKEISWRQYSPCMKSSFCFHAKTLQAFRQNLLNGLFYAQSRAGWGTFIDSCFSHCQLEVDIKWTRPRIHGKSLAKAVGDWYFGRSQSTHYIDCGFPTCNPTCVKYPLMSTST

SEQ ID NO: 221 - DNA, 1158 bp, Selaginella moellendorffii
atgttcttgctcatttcatttccattgcaagaatcatcagcgcaggaaatcgtcaacataacgatcttgcacaatgctgtcaaagagggcgcagtgtgtctcgatggaagcccaccagcgtattacttgcggagaagaaattccccaaattggctcctgttcttgcggggtggaggtgtgtgctatggcgacagcaaagaaaggtcctgcttgagccgcagcacatcagaacttggatcatcgcaacagatgagtgagcaaatcagcctaaactttggtattttgagcatttctaagaagaacaatccagatttctggaactggaatcatgtagaaatcacttattgtgatggtggaagctaccttggagatgttgagaaacctgtccaagtttttgatactgagacaaacaaaacccgctatctttactacagagggcgaaagatatggaattacaccatcagaaaccttctgcagaaaggcatgaaacatgcaaaccaggttcttctatctggctgttcagtaggggctactgccacagcagtttattgcaacgatttcaaacagttattacctcatgcaacagtaaaatgcttaatggatggtgggctttttgtgaacctgcctgatattacaggaaactactcgttgcaatccatttttgacataacagtgagggaacacaatattacattgggcattgaaagaaattatgttccaacaaatgcagcatataagcaactctttcctccatatattttgccatctattaagcaacccatgtttcttcttaattctgcatatgatacttggcagattagaaacacattactatacccaactgcggaatggagaccatgtgtcttaaattcatcttcttgccatcccaggcagctccaaatcttacaaggctttagatcaagtttcctaacaaatatttcacctgcttttgagaaagaaaaatggggtttcttcatcaattcatgttttcaccattgtcaaggtgacgtttccacagttcgagtaaataaccagacaattctggaagcaattggaaattggatgtacgaaagacaaaagaaagtcatcctagtggattttctttcatggccaaataatccaacttgtgtaacatattttgaagatacttggctttaa

SEQ ID NO: 222 - protein, 385 aa, Selaginella moellendorffii
MFLLISFPLQESSAQEIVNITILHNAVKEGAVCLDGSPPAYYLRRRNSPNWLLFLRGGGVCYGDSKERSCLSRSTSELGSSQQMSEQISLNFGILSISKKNNPDFWNWNHVEITYCDGGSYLGDVEKPVQVFDTETNKTRYLYYRGRKIWNYTIRNLLQKGMKHANQVLLSGCSVGATATAVYCNDFKQLLPHATVKCLMDGGLFVNLPDITGNYSLQSIFDITVREHNITLGIERNYVPTNAAYKQLFPPYILPSIKQPMFLLNSAYDTWQIRNTLLYPTAEWRPCVLNSSSCHPRQLQILQGFRSSFLTNISPAFEKEKWGFFINSCFHHCQGDVSTVRVNNQTILEAIGNWMYERQKKVILVDFLSWPNNPTCVTYFEDTWL

SEQ ID NO: 223 - DNA, 1248 bp, Selaginella moellendorffii
atgggaactagcagcgcacaaaattcgatgctccagtctcgcctagctttagctgctcttcttcttcttcttcttgtccagagctcttacagcgcgtttgaattgacaccggacgttccaccgatccaacaccaccatcgcaaggccggggacgggcaactttgggtgggaattacgatcgtttccagcgctttggcctcggcaactggaggcgtatgcttggatgggagtgctcctgcctatcatctcctcaaaggctctggaagtggcgcgaaaagctggcatttacatctagagggtggagcttggtgcgaatcgatcgagaagtgcgtcgagagggcatctacgaatctgggaagctccagcaagatggagacctcaatccctttcacgggccttctcaataacaattacaacgtcaacccagacttctataactggaatcacgtctacgtaagatactgcgatggatcatcgttcaacagtgacgtagcaaatccttacaagacttcttctggtcagacgctgtatttcagaggaagaaaagcttttaaagcgatcatagatgatctcaagtctcaaggtcttggcaatgcagaccaggcatttctcactggatgctcggccggaggactgtcaacgattcaccgttgcaatgactttcagtactatctccctgggatcaaagtcaagtgcttgagcgatggtggcttctttctcaacgcaccggataccagcggcaactatgcactgtatagtttttataatggagttgtcaacacacacagcttgaaagatacactgcctagctcttgcatctcatcaaaagatgcaacccagtgcttttttccacaaaacatgcaaaactacgttggaccgcccttgttcttcgtcaacggtgcctacgacttttggcagctagagaatgtcaagagattgtcgagagatcaatacagctcctgtgtggatcactcggcgtgcccaaacgtaaatgttctgcaagggttcaggcaaagcatgctcgacgcgctctccgtctcgcgctcccggggatcgtcggggatgttcatcgattcctgcttcagtcactgccaagttcaaggggatgacaagtggaacaatcccaaagtcaatggcctgtcaactgcaaaaactgtgggtgattggtactttggccgttcgtcgtcgtccatacacatcgactgtgcatacccttgcaatccaacttgtgtcacaaggctcgattga

SEQ ID NO: 224 - protein, 415 aa, Selaginella moellendorffii
MGTSSAQNSMLQSRLALAALLLLLLVQSSYSAFELTPDVPPIQHHHRKAGDGQLWVGITIVSSALASATGGVCLDGSAPAYHLLKGSGSGAKSWHLHLEGGAWCESIEKCVERASTNLGSSSKMETSIPFTGLLNNNYNVNPDFYNWNHVYVRYCDGSSFNSDVANPYKTSSGQTLYFRGRKAFKAIIDDLKSQGLGNADQAFLTGCSAGGLSTIHRCNDFQYYLPGIKVKCLSDGGFFLNAPDTSGNYALYSFYNGVVNTHSLKDTLPSSCISSKDATQCFFPQNMQNYVGPPLFFVNGAYDFWQLENVKRLSRDQYSSCVDHSACPNVNVLQGFRQSMLDALSVSRSRGSSGMFIDSCFSHCQVQGDDKWNNPKVNGLSTAKTVGDWYFGRSSSSIHIDCAYPCNPTCVTRLD

SEQ ID NO: 225 - DNA, 1350 bp, Glycine max
atggagaatgtgagaataaggcagtggttgaaccttctggtgtgtgcactgctgttgctgatatcagaagcttcttatgtgccaatcactattgttcagaacgcggtagctaaaggagctgtttgtttggatgggagtccaccagcttaccattttgataagggatttggatcagggattaacaattggttggttgcatttgagggaggaggatggtgcaacaatgtcactacttgccttgctcgcaagaccaatcgtctaggttcatctaagcaaatggcgaagcaaattgccttttcaggaattttgaacaacagggcaatgtttaatccagatttctacaactggaacagaatcaaggttaggtattgtgatggttcgtcatttactggtgatgtggaagcagtgaatccggtaactaagttgcacttcagaggagcaaggattttcaatgctgtcatggaagatttactagcaaaaggaatgaaaaatgctcgaaatgctattatctcaggatgctcagccggaggattaacatcagtactgcattgtgatcgatttcgagctctattacctagaggagctagagtgaaatgcctctcagatgctggttactttatcaatgcaaaggatgttttgggagaacaacacattgagcagtatttcagtcaagttgttgtcacacatggctctgccaggagtttgcctcaatcatgcacttcaagacttagcgcaaaactctgctttttcccacaatatttggtgtcacgcattactacaccaatcttctttgtaaacgcggcatacgactcatggcagattaagaacattttggcaccgggtgttgctgatcctgaaggccattggcatagctgcaagcttgatataaacaactgctcacctgatcaactcgatctaatgcaagggttcaggacagaatttttaagggctataactgtgcttggcaactcttcatccaaaggaatgttcatagactcttgctatgcccactgccaaactgaaatgcaggagacatggttgagaagtgactctccagagctgaaaaagacaacaattgcaaaggctgtagcagattggttttatgaaagaagacctttccatcagatagattgcccttacccttgcaaccccacttgtcacaaccgcgttttcgatccacaagaagaccacccaggaaaaaatgtgaccgcgaaaggaacatcagatgcatcagccacaaagtccaatttccccaaactaacaaacaaggtacgatggattgaacttgtgtgcattaatcgtggaatcagtgggcttctactaacgttggttcttctggtcatcctataa

SEQ ID NO: 226 - protein, 449 aa, Glycine max
MENVRIRQWLNLLVCALLLLISEASYVPITIVQNAVAKGAVCLDGSPPAYHFDKGFGSGINNWLVAFEGGGWCNNVTTCLARKTNRLGSSKQMAKQIAFSGILNNRAMFNPDFYNWNRIKVRYCDGSSFTGDVEAVNPVTKLHFRGARIFNAVMEDLLAKGMKNARNAIISGCSAGGLTSVLHCDRFRALLPRGARVKCLSDAGYFINAKDVLGEQHIEQYFSQVVVTHGSARSLPQSCTSRLSAKLCFFPQYLVSRITTPIFFVNAAYDSWQIKNILAPGVADPEGHWHSCKLDINNCSPDQLDLMQGFRTEFLRAITVLGNSSSKGMFIDSCYAHCQTEMQETWLRSDSPELKKTTIAKAVADWFYERRPFHQIDCPYPCNPTCHNRVFDPQEDHPGKNVTAKGTSDASATKSNFPKLTNKVRWIELVCINRGISGLLLTLVLLVIL

SEQ ID NO: 227 - DNA, 1260 bp, Glycine max
atgacaatgaagctgctgcttttggtagccgttgttgaagttgcatgcttagtttctgggatcttgtcctttggatctgagacactctctgagctttctttcttagaaaacgatgtcgtctcaacagcaagaccttcctcttcatctcaacctcttatggtcgacctcactctcattcaaggagctgattctaaaggagctgtctgtttggatggaacggtgcctggataccatttggatcgtggatttggatctggtgcagatagttggctaattcatttggagggaggaggatggtgtaataccatcagaaactgtgtctatagaaaaaatactcgtcgtggatcctcgaaatacatggaaaatcaaataccattcacgggaatattgagcaacaaacctgaagaaaaccctgatttctttaactggaatagagttaaattacggtactgtgatggggcgtctttcagtggagatagtgaagatgagtctgcacagcttcaatttcgaggacaaaaaatatggctagctgcaatggaggaattaatgtccaaaggaatgcagaaagccgatcaggcacttctctctggatgctctgcgggtggtctggcatcgataatacactgtgatgagttccggagcttgtttccaaaatcttccaaagtcaaatgtttgagtgatggaggtttttttcttgacgtaatggatgtatctgggggacgcacactgaggactctttttggaggtgtggttcagttgcaggagttacaaaaaaatctgccaaaaagttgtcttgaccaactagacccaacttcgtgcttctttcctcagaatatgatcgaacatgttgagaccccattgtttctactcaacgctgcttatgatgtgtggcaggtccaagctagtttagccccaccttcagctgaccgccttggctcttggaatgaatgcaaatcgaaccatgcaaattgtagctcatctcaaatgcagttcctccaagacttcagaaatcaaatgcttagtgacattaaagacttctcgagctcatctcaaactgggctattcataaattcttgttttgctcattgtcagtctgagagacaggagacatggtttgctgatgactctccccttatcgaggacaagccaattgcagttgctattggagactggtattttgatcgagaagttgtcaaagctattgactgtgcttacccgtgtgacaacagctgccataatctggtgtttaactttaagtga

SEQ ID NO: 228 - protein, 419 aa, Glycine max
MTMKLLLLVAVVEVACLVSGILSFGSETLSELSFLENDVVSTARPSSSSQPLMVDLTLIQGADSKGAVCLDGTVPGYHLDRGFGSGADSWLIHLEGGGWCNTIRNCVYRKNTRRGSSKYMENQIPFTGILSNKPEENPDFFNWNRVKLRYCDGASFSGDSEDESAQLQFRGQKIWLAAMEELMSKGMQKADQALLSGCSAGGLASIIHCDEFRSLFPKSSKVKCLSDGGFFLDVMDVSGGRTLRTLFGGVVQLQELQKNLPKSCLDQLDPTSCFFPQNMIEHVETPLFLLNAAYDVWQVQASLAPPSADRLGSWNECKSNHANCSSSQMQFLQDFRNQMLSDIKDFSSSSQTGLFINSCFAHCQSERQETWFADDSPLIEDKPIAVAIGDWYFDREVVKAIDCAYPCDNSCHNLVFNFK

SEQ ID NO: 229 - DNA, 1230 bp, Glycine max
atgaaggtgattctattactcatagcagcatcattttcctttgtttctgtacttagatctgaggctgagcatttgttccaaaacgatgccgtttcactggcagtggaagtaccgcccggacctccacctctcatggtccccctcactctcattcagggagctgcttccaaaggagccgtctgtttggatggaacattgcctggttaccactttcatcctggatttggatctggggcaaatagttggctcattcaattggagggaggaggatggtgtaataccatcagtagttgtgtctttagaaaaactactcgtcgtggttcctcaaaatacatggaaaagcaactagcattcacagggttgttgagcaataaagctgaagaaaaccctgatttctttaactggaacagagttaaagtacggtactgtgatggagcatctttcagtggagatagtcaaaacgaggttgcacagcttcaatttcgaggacaaaaaatatggcaagctgcaatgcaggaattattgttcaagggaatgcagaaggccaaccaggcccttttgtctggatgctctgcaggtggtctggcatctataatacattgtgatgagttccggagcttgtttcctacatctaccaaagtgaaatgtttgagtgacgccgggtttttcctagatgcagttgatgtatctgggggtcacacactgaggaatctgtttggaggtgtagttaagttacaggaggtgcaaaaaaatctgccaaatagttgtctcaaccaactggacccaacttcgtgtttttttcctcagaatttgatcaactatgttgagactccactgtttctgctcaatgcagcttatgatgcatggcaggtccaagaaagtttggtcccacattcagcagatccccatggctcttggaatgattgtaaagcaaatcatgcacactgtaactcatctcaaattcagttcctccaagacttcagaaatcaaatgctaaatgatgtgaaaggcttctctgagacatctcaaactgggttattcataaattcttgttttgctcattgccagtctgagagacaagatacatggtttgctgatgactctccactcattaacaacgtgccagttgcaattgctgttggagactggtttttggatcggaaaactgtcaaagctatcgactgtgcttacccctgtgacaatacctgccataatctggtcttcaagtga

SEQ ID NO: 230 - protein, 409 aa, Glycine max
MKVILLLIAASFSFVSVLRSEAEHLFQNDAVSLAVEVPPGPPPLMVPLTLIQGAASKGAVCLDGTLPGYHFHPGFGSGANSWLIQLEGGGWCNTISSCVFRKTTRRGSSKYMEKQLAFTGLLSNKAEENPDFFNWNRVKVRYCDGASFSGDSQNEVAQLQFRGQKIWQAAMQELLFKGMQKANQALLSGCSAGGLASIIHCDEFRSLFPTSTKVKCLSDAGFFLDAVDVSGGHTLRNLFGGVVKLQEVQKNLPNSCLNQLDPTSCFFPQNLINYVETPLFLLNAAYDAWQVQESLVPHSADPHGSWNDCKANHAHCNSSQIQFLQDFRNQMLNDVKGFSETSQTGLFINSCFAHCQSERQDTWFADDSPLINNVPVAIAVGDWFLDRKTVKAIDCAYPCDNTCHNLVFK

SEQ ID NO: 231 - DNA, 1239 bp, Glycine max
atgaaggtgattctattactcatagcagcatcattttcctttgtttctgtacttagatctgaggctgagcatttgttccaaaacgatgccgtttcactggcagtggaagtaccgcccggacctccacctctcatggtccccctcactctcattcagggagctgcttccaaaggagccgtctgtttggatggaacattgcctggttaccactttcatcctggatttggatctggggcaaatagttggctcattcaattggagggaggaggatggtgtaataccatcagtagttgtgtctttagaaaaactactcgtcgtggttcctcaaaatacatggaaaagcaactagcattcacagggttgttgagcaataaagctgaagaaaaccctgatttctttaactggaacagagttaaagtacggtactgtgatggagcatctttcagtggagatagtcaaaacgaggttagtgagagtatggcacttcaatttcgaggacaaaaaatatggcaagctgcaatgcaggaattattgttcaagggaatgcagaaggccaaccaggcccttttgtctggatgctctgcaggtggtctggcatctataatacattgtgatgagttccggagcttgtttcctacatctaccaaagtgaaatgtttgagtgacgccgggtttttcctagatgcagttgatgtatctgggggtcacacactgaggaatctgtttggaggtgtagttaagttacaggaggtgcaaaaaaatctgccaaatagttgtctcaaccaactggacccaacttcgtgtttttttcctcagaatttgatcaactatgttgagactccactgtttctgctcaatgcagcttatgatgcatggcaggtccaagaaagtttggtcccacattcagcagatccccatggctcttggaatgattgtaaagcaaatcatgcacactgtaactcatctcaaattcagttcctccaagacttcagaaatcaaatgctaaatgatgtgaaaggcttctctgagacatctcaaactgggttattcataaattcttgttttgctcattgccagtctgagagacaagatacatggtttgctgatgactctccactcattaacaacgtgccagttgcaattgctgttggagactggtttttggatcggaaaactgtcaaagctatcgactgtgcttacccctgtgacaatacctgccataatctggtcttcaagtga

SEQ ID NO: 232 - protein, 412 aa, Glycine max
MKVILLLIAASFSFVSVLRSEAEHLFQNDAVSLAVEVPPGPPPLMVPLTLIQGAASKGAVCLDGTLPGYHFHPGFGSGANSWLIQLEGGGWCNTISSCVFRKTTRRGSSKYMEKQLAFTGLLSNKAEENPDFFNWNRVKVRYCDGASFSGDSQNEVSESMALQFRGQKIWQAAMQELLFKGMQKANQALLSGCSAGGLASIIHCDEFRSLFPTSTKVKCLSDAGFFLDAVDVSGGHTLRNLFGGVVKLQEVQKNLPNSCLNQLDPTSCFFPQNLINYVETPLFLLNAAYDAWQVQESLVPHSADPHGSWNDCKANHAHCNSSQIQFLQDFRNQMLNDVKGFSETSQTGLFINSCFAHCQSERQDTWFADDSPLINNVPVAIAVGDWFLDRKTVKAIDCAYPCDNTCHNLVFK

SEQ ID NO: 233 - DNA, 1266 bp, Glycine max
atggagagagttttgtgggttgacattgctataggacttgttgttttcagcaactgggtcgatgggttcgtaggatatgaacatcacttcaatgaaacagagttgtctttattagaggctcatgaagcttccttgtcctacgccgggaccgagaggaataatcttctgctggtaggactcacccttattcaaaatgctgctgctaaaggagcagtctgcttggacggaacattacctggttatcatttgcatcggggatatggatcaggagcaaatagctggcttattaatttagagggtggtggatggtgtaataatattagaacatgtgtttatcgcaagaaaacccggcgtggatcatcagatttcatggaaaaggagataccttttactggtatattaagtaataaggctgaagaaaacccagattttttcaattggaatagagtaaagcttcgttattgtgatggtgcctcatttactggggatagtgaagatgagactgcagaactgcaattcagaggacagcgtatttgggcagctgcaatggaagatttgatgtcaaagggaatgcgttttgccagtcaggctattctttcgggatgctctgcgggtggcctggctactattattcattgtgatgaatttcgtggtctctttccaaggaccaccaaagtgaaatgtcttagtgatgctgggttgtttcttgatgcgattgatgtatctggtgggcatacccttaggaatttatacagtggagttgtaggattgcagggagcacagaagaatctgccacagatttgtactaatcaccttgatcccatctcgtgcttctttcctcaaaacttgattgccagtgttaagactccgctattcattcttaatgctgcttatgattcatggcagatccagtccagcttagctcctccatctgcagatccccatggctattggcatgaatgtagattaaaccatgctaaatgtactggaccacaaatccaatttctgcaaggattcagaaatcacatgctgaatgctattaaatacttctcaagatcaaagcagaatggcttgtttattaattcttgtttttctcactgccaaactgagaggcaggatacatggtttgctgacaattctcctgttatcaggaacaaggcaattgctctggctgttggagactggtatttcgatcgagcaggtgttaaggccattgattgtccttacccttgtgataatacatgccatcatctgattttcagatga

SEQ ID NO: 234 - protein, 421 aa, Glycine max
MERVLWVDIAIGLVVFSNWVDGFVGYEHHFNETELSLLEAHEASLSYAGTERNNLLLVGLTLIQNAAAKGAVCLDGTLPGYHLHRGYGSGANSWLINLEGGGWCNNIRTCVYRKKTRRGSSDFMEKEIPFTGILSNKAEENPDFFNWNRVKLRYCDGASFTGDSEDETAELQFRGQRIWAAAMEDLMSKGMRFASQAILSGCSAGGLATIIHCDEFRGLFPRTTKVKCLSDAGLFLDAIDVSGGHTLRNLYSGVVGLQGAQKNLPQICTNHLDPISCFFPQNLIASVKTPLFILNAAYDSWQIQSSLAPPSADPHGYWHECRLNHAKCTGPQIQFLQGFRNHMLNAIKYFSRSKQNGLFINSCFSHCQTERQDTWFADNSPVIRNKAIALAVGDWYFDRAGVKAIDCPYPCDNTCHHLIFR

SEQ ID NO: 235 - DNA, 1350 bp, Glycine max
atggagaatgcgagaataagccagtggttgatccttctggtgtgtgcgctgctgttgctgatatcagaagcttcttatgtgccaatcactattgttcagaacgcggtagcaaaaggagctgtttgtttggatgggagtccaccagcttatcattttgataggggatttggatcagggattaacaattggttggttgcatttgagggaggaggatggtgcaacaatgtcactacttgccttgctcgcaagaccaatcgtttaggttcatctaagcaaatggccaagctaattgccttttcaggaattttgaataacagggaaatgtttaatccagatttctacaactggaacagaatcaaggttaggtattgtgatggttcatcatttactggtgatgtggaagcagtgaatccagtgactaagttgcacttcagaggaggtaggattttcaatgctgtcatggaggatttactagcaaaaggaatgaaaaatgctcgaaatgctattatctcgggatgttcagctggaggattaacatcagtactgcattgtgatcgatttcgagctctattacctaggggagctagagtgaaatgcctctcagatgctggttactttatcaatggaaaggatgtcttgggagaacaacacattgaacagtacttcagtcaagttgttgccacacatggctctgctaggaatttgcctcaatcgtgcacttcaagacttagcccaaggctgtgctttttcccacaatatttggtgtcacgtatcactacaccaatcttctttgtaaacgcggcttacgactcatggcagattaagaacattttggcaccgggtgttgctgatcctgaaggccattggcatagctgcaagcttgatataaacaactgctcacctgatcaacttgatctaatgcaaggcttcaggacagaatttttaagggctataactgtgctaggcaactcttcatctaaaggaatgttcatagactcttgctatgcccactgccaaactgaaatgcaggagacatggttgagaagtgactctccagagctgaaaaagacaacaattgcaaaggctgtagcagattggttttatgaaagaaggcctttccatcagatagattgcccttacccttgcaaccccacttgtcacaaccgtgttttcgatccacaagacgaccatccaggaaaaaatgtgaccgcgaaaggaacatcagatgcatcagctacaaagcccaattttcccaaactaacaaacaaggcacagtggattgaacttgtgtgcattagtcgcgggatcagtgggcttctactaacgttggttcttctggtcatcctataa

SEQ ID NO: 236 - protein, 449 aa, Glycine max
MENARISQWLILLVCALLLLISEASYVPITIVQNAVAKGAVCLDGSPPAYHFDRGFGSGINNWLVAFEGGGWCNNVTTCLARKTNRLGSSKQMAKLIAFSGILNNREMFNPDFYNWNRIKVRYCDGSSFTGDVEAVNPVTKLHFRGGRIFNAVMEDLLAKGMKNARNAIISGCSAGGLTSVLHCDRFRALLPRGARVKCLSDAGYFINGKDVLGEQHIEQYFSQVVATHGSARNLPQSCTSRLSPRLCFFPQYLVSRITTPIFFVNAAYDSWQIKNILAPGVADPEGHWHSCKLDINNCSPDQLDLMQGFRTEFLRAITVLGNSSSKGMFIDSCYAHCQTEMQETWLRSDSPELKKTTIAKAVADWFYERRPFHQIDCPYPCNPTCHNRVFDPQDDHPGKNVTAKGTSDASATKPNFPKLTNKAQWIELVCISRGISGLLLTLVLLVIL

SEQ ID NO: 237 - DNA, 1149 bp, Glycine max
atggagccatggcgcgttctctcgcagcagcaacagagacttctcgtgaacatgacgctcgttccaaacgctcgtgctagcggtgctctttgtttggacggaagtttaccggcgtatcacttgcacagaggatttggagctggtaaagacaactggcttctacaatttgagggaggtggatggtgcaatgacttgaaatcatgcttggagagagccacaactaggaggggttcaacacgttatatgaccaagtgggaggtgttctctggtattttaagcaatagtgctacccttaatccagatttttacaattggaaccgtgtgaagctgagatattgtgatggagcttcatttactggagacgctgtgttcactaacaagacaacaacacttcatttcaaagggcaaagaatttgggaagccattattcgcgaccttttaccacagggtttgggaaaggcacggaaggctttgctttcaggttgctcagcaggagggttagcgacctttcaccattgtgacgccttcgccaagtatttgccaacgaatgctagtgttaaatgcttgagtgatgccggtttttttcttgatgaaagagatatcagtttgaatcacactatgaggtataatttcaaaagtctagttcaattgcaggggatagagaagaacctgaacagaaattgtaccagagcactgtactttccagacttgtgcttctttccacaatatgcgttgagatacatatcaacaccatattttatcttgaactctgcctatgatgtattccagttcactcatatattggtgccaccctctgctgatatgcgcggacactggaaacactgcaaggcaaacctggcagagtgtacaacagaacaaattgatacattgcaaggttttaggctagacatgcttggagctttgagaccgttctatatgaattcaagaagaggggggatgttcataaattcatgttttgctcattgccaaagtgaactacaagaaacatggtttggggatgattctccaagaataaacaataagactattgccgaagctgttggtgattggtattttagtagaaacttaagcaaggaaatagactgtgcatatccttgtgatgcaacttgtcataatcttataccgtaa

SEQ ID NO: 238 - protein, 382 aa, Glycine max
MEPWRVLSQQQQRLLVNMTLVPNARASGALCLDGSLPAYHLHRGFGAGKDNWLLQFEGGGWCNDLKSCLERATTRRGSTRYMTKWEVFSGILSNSATLNPDFYNWNRVKLRYCDGASFTGDAVFTNKTTTLHFKGQRIWEAIIRDLLPQGLGKARKALLSGCSAGGLATFHHCDAFAKYLPTNASVKCLSDAGFFLDERDISLNHTMRYNFKSLVQLQGIEKNLNRNCTRALYFPDLCFFPQYALRYISTPYFILNSAYDVFQFTHILVPPSADMRGHWKHCKANLAECTTEQIDTLQGFRLDMLGALRPFYMNSRRGGMFINSCFAHCQSELQETWFGDDSPRINNKTIAEAVGDWYFSRNLSKEIDCAYPCDATCHNLIP

SEQ ID NO: 239 - DNA, 1266 bp, Glycine max
atgagaatggggaacctcttctggcttggcattgttgcagcacttgttttcagcttctgggttgattccttttctgcctatgaatatcaccacttcaatgaaaccgagttctctttgttggagtctcaagaacaggtacattcatccctccttgggagaacttctctcatggttggactcacagttattcaaagtgctgctggcaaaggagcagtttgcttggatggaacattgcctgcttatcatttgcatcggggatatggatcaggagcaaacagctggatcgttaatttagagggaggtgggtggtgtaatgacgttagatcatgtgtttatcgcaagaaaacacggcgtgggtcatcaacattcatggaaaaacagataccttttactggaatattaagcaataatgttgaagataatccagattttttcaactggaacagagtgaaaattcgttattgtgacggtgcctcttttgctggggatggtgaagataaggctgcgcaactgcaatttagaggacagcgtatttggtcggcagcaatcgaagatttgatgtcaaagggaatgcgatttgccaggcaggctcttctttctggatgctcggctggtggtttggctactattatacactgtgatgaattcagaggttttttcccacagactacgaaagtgaagtgtcttagtgatgcaggattatttcttgatgcgattgatgtctccaggggacataccatcaggaattttttcagtggtgtcgtaaggctacagggagtgcaaaagaatctgccacacatttgtactagtcaccttgatcccacttcgtgcttcttccctcagaatttgattgctggtattagaaccccgctattcattcttaatactgcctatgactcatggcaggtccaatcaagcttagctccttcatcagcagatccccatggcttttggcatgattgcagattaaatcatgctaaatgtacttcttcacaaatccaatatttgcaaggattcaggaatcaaatgctgaatgctattaaaggcttctcaagatcacgtcagaatggattgttcataaattcatgttttgctcactgccaatctgagaggcaggatacatggtttgctgacaactctcctgtcattgggaacaaggcaattgctctttctgttggagactggtatttcgaccgagcagttgttaaggccattgattgtccttacccttgtgataatacatgccaccatcttgtcttcagatga

SEQ ID NO: 240 - protein, 421 aa, Glycine max
MRMGNLFWLGIVAALVFSFWVDSFSAYEYHHFNETEFSLLESQEQVHSSLLGRTSLMVGLTVIQSAAGKGAVCLDGTLPAYHLHRGYGSGANSWIVNLEGGGWCNDVRSCVYRKKTRRGSSTFMEKQIPFTGILSNNVEDNPDFFNWNRVKIRYCDGASFAGDGEDKAAQLQFRGQRIWSAAIEDLMSKGMRFARQALLSGCSAGGLATIIHCDEFRGFFPQTTKVKCLSDAGLFLDAIDVSRGHTIRNFFSGVVRLQGVQKNLPHICTSHLDPTSCFFPQNLIAGIRTPLFILNTAYDSWQVQSSLAPSSADPHGFWHDCRLNHAKCTSSQIQYLQGFRNQMLNAIKGFSRSRQNGLFINSCFAHCQSERQDTWFADNSPVIGNKAIALSVGDWYFDRAVVKAIDCPYPCDNTCHHLVFR

SEQ ID NO: 241 - DNA, 1281 bp, Glycine max
atgacaatgaagctggttttggtagttgttgttgaagttgcatgcttagtttctgggatcttgtcctttggatctgagacactctctgagctttctttcttagaaaatgatgtcgtctcaacaacaagaccttcctcttcatctcaacttcaacctcaacctcaacctcaacctcttatggtggacctcactctcattcatgaagctgattctaaaggagctgtctgtttggatggaacggtgcctggataccatttggatcgtggatttggatctggtgcagatagttggcttattcatttggagggaggaggatggtgtaataccatcagaaactgtgtctatagaaaaaatactcgtcgtggatcctcaaaatacatggaaaatcaaataccattcacgggaatattgagcaacaaacctgaagaaaaccctgatttctttaactggaatagagttaaattacggtactgtgatggagcatctttcagtggagatagtgaagatgagtctgcacagctccagtttcgaggacaaaaaatatggctagctgcaatggaggaattaatgtccaaaggaatgcagaaagccgatcaggcacttctctctggatgctctgcgggtggtctggcatccataatacactgtgatgagttcgggagcttgtttggaaaatcttccaaagttaaatgtttgagcgatggaggtttttttcttgatgcaatggatgtatctgggggacgcacactgaggactcttttcggaggtgtggttcagttgcaggatgtacaaaaaaatctgccaaaaagttgtctcgaccaactagacccaacttcgtgcttctttcctcagaatatgatcgaacatgttgagaccccattgtttctactcaatgctgcttatgatgtgtggcaggtccaagccagtttagccccaccttcagctgaccgccttggttcttggaatgaatgcaaatcgaaccatgcaaattgtagctcatctcaaatgcagttccttcaagacttcagaaatcaaatgctgggtgacattaaagacttctcaagctcatctcaaactgggctattcataaattcttgttttgctcattgtcagtctgagagacaggagacatggtttgctgatgactctccccttatcgaggacaagccaattgcagttgctgttggagactggtattttgatcgagaagttgtcaaagctattgactgtgcttacccatgtgacaacagctgccataatctggtgtttaactttaagtga

SEQ ID NO: 242 - protein, 426 aa, Glycine max
MTMKLVLVVVVEVACLVSGILSFGSETLSELSFLENDVVSTTRPSSSSQLQPQPQPQPLMVDLTLIHEADSKGAVCLDGTVPGYHLDRGFGSGADSWLIHLEGGGWCNTIRNCVYRKNTRRGSSKYMENQIPFTGILSNKPEENPDFFNWNRVKLRYCDGASFSGDSEDESAQLQFRGQKIWLAAMEELMSKGMQKADQALLSGCSAGGLASIIHCDEFGSLFGKSSKVKCLSDGGFFLDAMDVSGGRTLRTLFGGVVQLQDVQKNLPKSCLDQLDPTSCFFPQNMIEHVETPLFLLNAAYDVWQVQASLAPPSADRLGSWNECKSNHANCSSSQMQFLQDFRNQMLGDIKDFSSSSQTGLFINSCFAHCQSERQETWFADDSPLIEDKPIAVAVGDWYFDREVVKAIDCAYPCDNSCHNLVFNFK

SEQ ID NO: 243 - DNA, 1212 bp, Glycine max
atgtttttgtttgtggggttggtgattgtgaaatgggtggaaggctttgaggatgctaatgtgacagaccttgacatgcaatatgtcagtggaagaggtttctacagacctttgatggttggttttactcttattaatggcgctgctgctaaaggagctgtttgcctggatggatctttaccggggtaccatttccaccgtggatatggttcaggatcaaacagttggctcatacaattggagggaggaggctggtgtggaactataaaaaattgtctttatagtaagaaaacacgtcatggttcatcattttttatggaaaaacaaataccatttattgggatattgagcaacaaagctgaggaaaatccagattttttcaattggaatagaataaaaatccgttattgcgacggtgcatcatttagtggggacagtcaaaatgcgggagcagggttatatttcagagggcaacgcatttggcaagctgctatggaagatttaatgtcaaaagggatgcgctatgccaaacaggctcttctatctggatgttctgctggaggtttagctactattatacattgtgatgaatttcgggaattgtttactagaaccacaagagtaaaatgcttaagtgatgctggattattccttgattccgttgatgtatctggtcgtcgcagcttaaggaatttgtttggaagtgtggtcaccttacagggagtgcaaaggagtcttccaaggagttgtaccagtcgcctcaatccaattttgtgctattttcctcagcacttaattgccggtgtcaggacaccattatttcttctcaatgcagcttatgatacttggcagattcaagccagtcttgctccaccatctgctgactaccattggaactggtatgaatgcagaaaaaattatgcacgttgcagtgcaccacagatacagtatcttcaaggttttcgaaatcagatgcttagatctacaagagccttctcacggtcttataaaaatgggttattcataaattcatgtttcgcccattgccaatcagaaagacaggatacatggtttgctcatgattcccctcgtattggaaatagggggatcgcggagtcggttgggaactggtattttggccgagttagtgtccaggctattggctgtccttacccttgtgacaaaacctgccataatttggtatttaagtga

SEQ ID NO: 244 - protein, 403 aa, Glycine max
MFLFVGLVIVKWVEGFEDANVTDLDMQYVSGRGFYRPLMVGFTLINGAAAKGAVCLDGSLPGYHFHRGYGSGSNSWLIQLEGGGWCGTIKNCLYSKKTRHGSSFFMEKQIPFIGILSNKAEENPDFFNWNRIKIRYCDGASFSGDSQNAGAGLYFRGQRIWQAAMEDLMSKGMRYAKQALLSGCSAGGLATIIHCDEFRELFTRTTRVKCLSDAGLFLDSVDVSGRRSLRNLFGSVVTLQGVQRSLPRSCTSRLNPILCYFPQHLIAGVRTPLFLLNAAYDTWQIQASLAPPSADYHWNWYECRKNYARCSAPQIQYLQGFRNQMLRSTRAFSRSYKNGLFINSCFAHCQSERQDTWFAHDSPRIGNRGIAESVGNWYFGRVSVQAIGCPYPCDKTCHNLVFK

SEQ ID NO: 245 - DNA, 1197 bp, Glycine max
atggaaagtgcaagaatcagccaatggttaaatcttctagtttgtgtactgctattacttaaggcagaaggatcttcagttccattgactttggtcgagaatgccgaatcaaaaggagctgtatgtttggatggaagtccaccagcttaccactttgataagggatttggagaagggattgacaactggattgttcacattgagggaggaggatggtgcaacaatgtcgagagttgccttgaacgtaagaacactagattaggttcatctaagcaaatgaaggatatttacttttcggcaattttaagcaatgagcaacagtttaatccagatttctacaattggaatagagtcaaggttaggtactgtgatggttcatcgtttactggtgatgtggaagaagttgatccaacaaccaatttgcacttcagaggagcaaggattttttcagctgtaatggaagaattactagcaaaaggaatgaagaacgttaaaaatgctattctctctggctgttcagcgggaggattgactactatattacactgtgatagctttaaagctttgttgccttctggagctaatgtgaaatgtgttccagatgctggttattttgtcaatgtagaggatatttcaggagcacattccattcaagagttctacagtgaagttgtttcaatacatggttcagcaaagaatttacccacatcttgcacttcaaaactcaacccagcactgtgcttctttccacaatatgtggcatcacatatcagtactccaatcttcgttgttaattcagcctatgacaggtggcagattcgaaacatctttatacctggctccgctgatcccagtaatagttggcatagctgcaagattaatataagcaactgctcaactgatcaactaagtaaaattcaaggcttcaagagtgaattcgaaagggcattgagtgaggtaggagattctccatctaaaggaatgtttattgactcttgctatgcccactgccaaacagaattacaggagacatggttaaagagtgactctccacagctcgccaatacaactattgccaaggcagtgggagactggttttatggtcgaagctctttccaccatgtagattgtaattttccttgcaaccctacttgccacaatcgtgtttttaatctaaaagatcaccccggaatataa

SEQ ID NO: 246 - protein, 398 aa, Glycine max
MESARISQWLNLLVCVLLLLKAEGSSVPLTLVENAESKGAVCLDGSPPAYHFDKGFGEGIDNWIVHIEGGGWCNNVESCLERKNTRLGSSKQMKDIYFSAILSNEQQFNPDFYNWNRVKVRYCDGSSFTGDVEEVDPTTNLHFRGARIFSAVMEELLAKGMKNVKNAILSGCSAGGLTTILHCDSFKALLPSGANVKCVPDAGYFVNVEDISGAHSIQEFYSEVVSIHGSAKNLPTSCTSKLNPALCFFPQYVASHISTPIFVVNSAYDRWQIRNIFIPGSADPSNSWHSCKINISNCSTDQLSKIQGFKSEFERALSEVGDSPSKGMFIDSCYAHCQTELQETWLKSDSPQLANTTIAKAVGDWFYGRSSFHHVDCNFPCNPTCHNRVFNLKDHPGI

SEQ ID NO: 247 - DNA, 1197 bp, Glycine max
atggagagtgcaagaatcagccaatggttaaatcttcttgtttgtgtactgctattgctcaaggcagaaggatctttagttccattgattttggtcgagaatgcagaatcaaaaggagctgtttgtttggatggaagtcccccagcttaccactttgataagggatttggggaaggtattaatagctggattgttcacattgagggaggaggatggtgcaacaatatcgagagttgccttgaccgtaaggacactcgcttaggttcatctaagcaaatggaggatatttacttttctggaattttaagcaatgagcaacagtttaatccagatttctacaattggaatagagtcaaggttaggtactgtgatggttcatcgtttactggtgatgtggaagaagttgatccaacaaccaatttgcacttcagaggagcaaggattttttcagctgtaatagaagaattactagcaaaaggattggaaagggctgaaaatgctattctctctggctgttcagctggaggattgacaactatattacactgtgatagctttaaaacttttttgccctctagagctaatgtgaaatgtgttccagatgctggttattttgtcaatgtagaggatatctcgggagcacatttcattcaacagtactacagtgaagttgtttcaacacatggttctgcaaagaatttgcccacatcctgcacttcaaaactcagcccaacactatgcttttttccacaatatgtggcatcacatatcagtaccccaatcttcgttgttaattcagcctatgactcgtggcagattcgatacatctttgtacctggctctgctgatcccagtgatagttggaatagctgcaaggttaatatgagcaactgctcgcctgatcaactaagtaaattgcaaggcttcaagagtgaattcgaaagggcattgagtgaggtaggagattctccatctaaaggaatgtttattgactcttgctatgcccactgccaaacagaaccacaggagacatggtttaagactgactctccaaagcttgccaatacaactattgccaaggcagtggcagactggttttatggtcgaagttctttccgccatgtggattgcaattatccttgcaacccttcttgccagaaccgtgtttttgatctaaaagacctccctggaatatag

SEQ ID NO: 248 - protein, 398 aa, Glycine max
MESARISQWLNLLVCVLLLLKAEGSLVPLILVENAESKGAVCLDGSPPAYHFDKGFGEGINSWIVHIEGGGWCNNIESCLDRKDTRLGSSKQMEDIYFSGILSNEQQFNPDFYNWNRVKVRYCDGSSFTGDVEEVDPTTNLHFRGARIFSAVIEELLAKGLERAENAILSGCSAGGLTTILHCDSFKTFLPSRANVKCVPDAGYFVNVEDISGAHFIQQYYSEVVSTHGSAKNLPTSCTSKLSPTLCFFPQYVASHISTPIFVVNSAYDSWQIRYIFVPGSADPSDSWNSCKVNMSNCSPDQLSKLQGFKSEFERALSEVGDSPSKGMFIDSCYAHCQTEPQETWFKTDSPKLANTTIAKAVADWFYGRSSFRHVDCNYPCNPSCQNRVFDLKDLPGI

SEQ ID NO: 249 - DNA, 1197 bp, Glycine max
atggagagtgcaagaatcagcaaatggttaaatcttctagtttgtgtactgctattgcttaaggcagaaggatctcttgttccattgactttggtgaagaatgcagaatcaaaaggagctgtttgtttggatggaagccccccagcataccactttgacaacggatttgaagaagggattaagaactggattgttcacattgagggaggaggatggtgcaacaatgtagagagttgcctttaccgtaaggatagtcgcttaggttcatctaagcaaatggaggatctttacttttctgcaattttaagcaacgaacaagagtataatccagatttctacaattggaatagagtcaaggttaggtactgtgatgggtcatcgtttactggtgatgtggaagaagttgatcaaacaaccaatttgcacttcagaggagcaaggattttttcagctgtaatggaagaattactagcaaaaggattggaaaaggctgaaaatgctattctctctggctgttcagctggaggactgactacaatattacactgtgatcgctttaaaaatctgttgccttctgaagctaatgtgaaatgtgttccagatgctggttattttgtcaatgtagaggatatctcaggaacacatttcatcgaaaagttctacagtgaagttgtttcaactcatggctcagcaaagaatttgccctcatcctgcacttcaaaattcagcccagaactatgctttttcccacaatatgtggcatcacatatcagtactccaatcttcgttgtaaatgcagcctatgactcatggcagattcagaacatctttgtacctggctctgctgatcccagtgacagttggcatagctgcaagcttgatataagcaactgctcacctgatcaactaagtaaaatgcaagacttcaagtcggaattcgaaaaggctgtgagtgtggtaggcgactcttcatctaaaggaatgttcatagactcttgctatgctcactgccaaacagaatcacaggagacatggtataagagtgactctccacagcttgccaatacgactattgccaaggcagtgggagactggttttatggtcgaagttctttccgtcacgtggattgcaattatccttgcaacccttcttgccagaaccgtgtttttgatctaaaagaccaccctggaatatag

SEQ ID NO: 250 - protein, 398 aa, Glycine max
MESARISKWLNLLVCVLLLLKAEGSLVPLTLVKNAESKGAVCLDGSPPAYHFDNGFEEGIKNWIVHIEGGGWCNNVESCLYRKDSRLGSSKQMEDLYFSAILSNEQEYNPDFYNWNRVKVRYCDGSSFTGDVEEVDQTTNLHFRGARIFSAVMEELLAKGLEKAENAILSGCSAGGLTTILHCDRFKNLLPSEANVKCVPDAGYFVNVEDISGTHFIEKFYSEVVSTHGSAKNLPSSCTSKFSPELCFFPQYVASHISTPIFVVNAAYDSWQIQNIFVPGSADPSDSWHSCKLDISNCSPDQLSKMQDFKSEFEKAVSVVGDSSSKGMFIDSCYAHCQTESQETWYKSDSPQLANTTIAKAVGDWFYGRSSFRHVDCNYPCNPSCQNRVFDLKDHPGI

SEQ ID NO: 251 - DNA, 1245 bp, Glycine max
atgacaagattagaagacaatataaaattttccttgttctatgtaatggagatcactagaataggccaatggttaagtcttctgatatgtgtactactattactgcagacagaaggggttcctgtgggaatcacttttgttgaaaatgcagtggcaaaaggggctgtttgtttggatgggagtcctccagcttaccacttccacaagggatctggagcagggattaacaactggatagttcactttgagggaggaggatggtgcaacaacgttactacttgcctttcccgtagggacactcgattaggttcatctaagaaaatggatacatcactttccttttctgggtttttcagtaacagtaaaaagttcaatccagatttctatgattggaacagaatcaaggttaggtattgtgatgggtcatcatttactggtgatgttgaagctgttgatccgaaaaccaatttgcacttcagaggagcaagggtttttgctgtggtcgttgaggatttattagcaaaaggaatgaaaaatgctcaaaatgcaattatctccggatgttcagctggaggattggcttctattctaaattgcgatcgattcaaatcactactacctgcaacaactaaagtgaaatgccttgcagatgctggtttttttatcaatgtaaaggatgtctctggagcacagcgcattgaagagttctacagtcaagttgttcaaacacatggctcagcaaagaatttgcctacatcctgcacttcaagactcagaccagggctgtgctttttccctcaaaatgtcgtgtcccaaatcagtaccccaatcttctttgtaaatgcagcctatgactcatggcagatcaaaaacattttggcaccaggtgctgctgatccccgtggccaatggcgtgaatgcaagcttgatatcaaaaactgctcacctaatcaactcagtgtaatgcaaggattcaggacagatttcttaagggcatttagtgtggttggcaacgccgcatctaaagggcattttatagatggttgctatgcacactgccaaactggaatacaagagacatggctgagaaatgactccccagtggtggccaagacatcaattgcaaaggcagtgggtgattggttttatgatcgaaggcccttccgtgagatagattgtgcctacccttgcaaccctacttgccataatcgtatttttgatcagaatgagcgtccagacgtatag

SEQ ID NO: 252 - protein, 414 aa, Glycine max
MTRLEDNIKFSLFYVMEITRIGQWLSLLICVLLLLQTEGVPVGITFVENAVAKGAVCLDGSPPAYHFHKGSGAGINNWIVHFEGGGWCNNVTTCLSRRDTRLGSSKKMDTSLSFSGFFSNSKKFNPDFYDWNRIKVRYCDGSSFTGDVEAVDPKTNLHFRGARVFAVVVEDLLAKGMKNAQNAIISGCSAGGLASILNCDRFKSLLPATTKVKCLADAGFFINVKDVSGAQRIEEFYSQVVQTHGSAKNLPTSCTSRLRPGLCFFPQNVVSQISTPIFFVNAAYDSWQIKNILAPGAADPRGQWRECKLDIKNCSPNQLSVMQGFRTDFLRAFSVVGNAASKGHFIDGCYAHCQTGIQETWLRNDSPVVAKTSIAKAVGDWFYDRRPFREIDCAYPCNPTCHNRIFDQNERPDV

SEQ ID NO: 253 - DNA, 1197 bp, Glycine max
atggagagtgcaagaatcagccactggttaaatcttctagtttgtgtactgctattgctcaaggcagaaggatcttcagttccattgactttggtcaagaattcagaaacaaaaggagctgtttgtttggatggaagtccaccagcttaccactttgataagggatttggaaaagggattaacaactggattgttcacattgagggaggaggatggtgcaacaatgtcacgagttgccttgaccgtaagaacactaccttaggttcatctaaccacatgtcggatatttccttttatgcaattttaagcaatcagcaacagtttaatccagatttctacaattggaatagagtcaaggttaggtactgtgatggttcatcgtttaccggtgatgtggaagaagttgatccaacaaccaatttgcacttcagaggagcaaggattttttcagctgtaatggaagaattactagcaaaaggaatgaagaacgctaaaaatgctattctctctggctgttcagctggaggattgactactatattacactgtgatagctttaaagctttgttgccttctagagctaatgtgaaatgtgttccagatgctggttattttgtcaatgtagaggatatttcaggagcacattcctttcaagagttctacagtgaagttgtttcaatacatggttcagcaaagaatttacccacatcttgcacttcaaaacacaacccagcactgtgtttttttccacaatatgtggcatcacatatcagtaccccaatcttcgttgttaattcagcctatgactggtggcagattggaaacatctttgtacctagctctgcggatcccagtaatagttggcatagttgcaagcttaatttaagcaactgttcacctgatcaactaagtaaattgcaaggcttcaaaagtgaattccaaagggcattgagtgaggtaggagattctccatctaaaggaatgtttattgactcttgctatgcccactgccaaacagaaacacaagagacatggtttaaaagcggttctcaactgcttgccaataaaactattgccaaggcagtgggagactggttttatggtcgaagtccttttcaccatatagattgtaattttccttgcaaccctacttgccacaatcgtgtatttcaagtaaaagactaccctggaatataa

SEQ ID NO: 254 - protein, 398 aa, Glycine max
MESARISHWLNLLVCVLLLLKAEGSSVPLTLVKNSETKGAVCLDGSPPAYHFDKGFGKGINNWIVHIEGGGWCNNVTSCLDRKNTTLGSSNHMSDISFYAILSNQQQFNPDFYNWNRVKVRYCDGSSFTGDVEEVDPTTNLHFRGARIFSAVMEELLAKGMKNAKNAILSGCSAGGLTTILHCDSFKALLPSRANVKCVPDAGYFVNVEDISGAHSFQEFYSEVVSIHGSAKNLPTSCTSKHNPALCFFPQYVASHISTPIFVVNSAYDWWQIGNIFVPSSADPSNSWHSCKLNLSNCSPDQLSKLQGFKSEFQRALSEVGDSPSKGMFIDSCYAHCQTETQETWFKSGSQLLANKTIAKAVGDWFYGRSPFHHIDCNFPCNPTCHNRVFQVKDYPGI

SEQ ID NO: 255 - DNA, 1260 bp, Glycine max
atgtgccaaagaagcatgagtggtggtggcatgaagctgctgaggatgtttgtgtttgtggggttggtgattgtgaaatgggtggaaggctttgaggatgctaatgtgacagacctaggcatgcaatatgtcagtggaagaggtttctacagacctttgatggttggttttactcatattaatggtgctgctgctaaaggagctgtctgcctggatggatctttaccggggtaccacttccaccgtggatatggttcaggatcaaacagttggctcatacaattggagggaggaggctggtgtggaactgtaaaaaattgtctttatagtaagaaaacacgtcatggttcatcattttttatggaaaaacaaataccatttattgggatattgagcaacaaagctgaggaaaatccagattttttcagttggaatagaataaaaatccgttattgtgacggtgcatcatttagtggggacagtcaaaatgcgggagcagggttgtatttcagagggcagcgcatttggcaagctgctatggaagatttaatgtcaaaagggatgcgctatgccaaacaggctcttctatctggttgttctgcgggaggtttagctactattatacattgtgatgaatttcgggaattgtttcctagaaccacaagagtaaaatgcttaagtgatgctggattattccttgattctgttgatgtttctggtcgtcgcagcttaaggaatttgttcggaggtgtggttaccttgcagggagtgcaaagaagtcttccaaggagttgtactagtcgcctcaatccaattttgtgctattttcctcagcacttaattgctggtgtcaggacaccactgtttcttctcaatgcagcttatgatacttggcagattcaagcgagtcttgctccaccatctgctgactaccactggaactggtatgaatgcagaaaaaattatgcacgttgcagtgcaccacagatacagtatcttcaaggtttccgaaatcagatgcttagatctacaagagccttctcacggtcttttaaaaacgggttgttcataaattcttgtttcgcccattgccaatcagaaagacaggatacatggtttgctcgtgattcccctcatattggaaatagagggattgcggagtctgttgggaactggtattttgatcgagttagtgtccaggccattggctgcccttacccttgtgacaaaacatgccataatttggtatttaagagatag

SEQ ID NO: 256 - protein, 419 aa, Glycine max
MCQRSMSGGGMKLLRMFVFVGLVIVKWVEGFEDANVTDLGMQYVSGRGFYRPLMVGFTHINGAAAKGAVCLDGSLPGYHFHRGYGSGSNSWLIQLEGGGWCGTVKNCLYSKKTRHGSSFFMEKQIPFIGILSNKAEENPDFFSWNRIKIRYCDGASFSGDSQNAGAGLYFRGQRIWQAAMEDLMSKGMRYAKQALLSGCSAGGLATIIHCDEFRELFPRTTRVKCLSDAGLFLDSVDVSGRRSLRNLFGGVVTLQGVQRSLPRSCTSRLNPILCYFPQHLIAGVRTPLFLLNAAYDTWQIQASLAPPSADYHWNWYECRKNYARCSAPQIQYLQGFRNQMLRSTRAFSRSFKNGLFINSCFAHCQSERQDTWFARDSPHIGNRGIAESVGNWYFDRVSVQAIGCPYPCDKTCHNLVFKR

SEQ ID NO: 257 - DNA, 1287 bp, Glycine max
atgccttcatggtcgtcttcttcttccgctctaaccgctcccaatttgcgtcttcgcactctcagaatttggtcctccaaggactatgcaatcgccgcattcattttcctcattctcttctctctccttctcttctcccacttggattcccgttacgattcccagccccatcactccaagctcgttccgttaaccctcctccgcaacgccaaccaaacgcgcgcgctttgcttggacgggagcgctcccggttaccatttccaaagcgggttcggatccggatcccgcaattggctgatccacattgagggaggagggtggtgcaattcgataccttcttgctaccagcgaaaattcactcatttggggtcttccgatcatatggagaagcttattcctttttcaggaattttgagctctgaccctgctcagaaccctgatttctttaactggaacaaggtgaagatacgttattgtgacggtgcatcttttgcgggtcatccagagagtgagcagagaggaagtgggttgttcttcagaggccaggtcatatgggaagctattatggatgaactcttatcaactggcctgtctaatgcaaagcaggctttgctttcaggatgctctgctggagggttggcaactcttatacactgtgatagtttccgacaagtacttccaaaggaagcaactgtcaagtgtcttgctgatgcaggcttcttcctagatgagaaggatattagtggaaacagtacaatgagatctttctatcatgatgttgcccagcttcagggtcttgcaaaaagtttgcacaaagattgcattgctaaaatggaaccatctaagtgtctctttccatcagaaattgctaaaaacataaagactccactgttccttgttcatccagcttatgatttctggcagatacgcaatattttggtgcctcaaggatcagatcctgatggtcactggcaaaggtgcagactggacattcgcagttgtaatgctaatatgattgataaacttgacagttaccgtggctctttgctgaaggctgtgaatgaattccaacaacgaaaggagattggaatgtttatagattcatgcttcgtccattgccagactgagatggaagtgacgtggcattcacccaactctcctaaaataaatgataagacaattgcggaatctgttggtgattggtactttgaccgagaagcggtaaagcgcattgactgctcttctttttcgtgcaaccccacttgccacaacatggatttcacctga

SEQ ID NO: 258 - protein, 428 aa, Glycine max
MPSWSSSSSALTAPNLRLRTLRIWSSKDYAIAAFIFLILFSLLLFSHLDSRYDSQPHHSKLVPLTLLRNANQTRALCLDGSAPGYHFQSGFGSGSRNWLIHIEGGGWCNSIPSCYQRKFTHLGSSDHMEKLIPFSGILSSDPAQNPDFFNWNKVKIRYCDGASFAGHPESEQRGSGLFFRGQVIWEAIMDELLSTGLSNAKQALLSGCSAGGLATLIHCDSFRQVLPKEATVKCLADAGFFLDEKDISGNSTMRSFYHDVAQLQGLAKSLHKDCIAKMEPSKCLFPSEIAKNIKTPLFLVHPAYDFWQIRNILVPQGSDPDGHWQRCRLDIRSCNANMIDKLDSYRGSLLKAVNEFQQRKEIGMFIDSCFVHCQTEMEVTWHSPNSPKINDKTIAESVGDWYFDREAVKRIDCSSFSCNPTCHNMDFT

SEQ ID NO: 259 - DNA, 1995 bp, Glycine max
atgaggaaatcacgtgataatggtaagccactaagtctagtgactagtgactcattcattcagttcaagttgcctgcaccatccattcctgttatcccccttgttttcataagtgtcctagttcccttgtatgaactattttttgtgccatttgcaagaaagatcactcaccacccttcaggcataacacaactacaaagggttggtgtggggttagtactctcggcaatatcaatggcagtggcagggattgtggaagtgaaaagaagggaccaagggagaaaagacccttctaagcctataagcctattttggctttcattccaatatggcatatttggcattgcagatatgttcacccttgtgggactattggagtttttctacagggaatcacctgctagcatgaaatcactttcaacctctctcacgtggctgtcaacatctcttggttacttcttgagcacagtctttgtcaatgtcatcaatgctgttagcaaaaggatcacaccaagcaaacaagggtggctgcatgggttcgacttgaaccaaaataaccttaacttgttctattggttccttgccacccttagttgccttaacttctttaactacctctattgggcctcaaggtaccagtacaacgtgaagactcaggccctgatttgggtgtgcttcgttagcgaaacaaaaagtacgtacagtgttgttttgtttgtcttaatttgttccatggagatggagagagttttgtgggttggcattgctataggacttgttttcagcaactgggtcgtaggatatgaacaatatcacttcaatgaaacagagttgtctttattagaggctcatgaagcttccttgtcctacgccgggaccgagagaaataatcttctgctggtaggactcacccttattcaaaatgctgctgctaaaggagcagtctgcttggatggaacattgcctggttatcattggcatcggggatatggatcaggagcaaatagctggcttattaatttagagggtggtggatggtgtaataatattagaacatgtgtttatcgcaagaaaacccggcgtggatcatcagatttcatggaaaaggagataccttttactggaatattaagtaataaggctgaagaaaatccagattttttcaattggaatagagtaaagcttcgttattgtgatggcgcctcatttactggggatagtgaagatgagactgcagaactgcaattcagaggacagcgtatttgggcagctgcaatggaagatttgatgtcaaaaggaatgcgttttgccaatcaggctcttctttcgggatgctctgcgggtggcctggctactattattcattgtgatgaatttcgtggtctctttccaaggaccaccaaagtgaaatgtcttagtgatgctgggttgtttcttgatgtgattgatgtatctggagggcatacccttaggaatttatacagtggtgttgtaggattgcagggagcacagaagaatctgccacaaatttgtactaatcaccttgatcccatctcgtgcttctttcctcaaaacttgattgccagtgttaagaccccgctattcattcttaatgctgcttatgattcatggcagatccagtccagtttagctcctccatcagcagatccccatggctattggcaacaatgtagattaaaccatgctaaatgtactggaccacaaattcaatttctgcaaggattcaggaatcatatgctgaatgctattaaatacttctcaagatcaaagcagaatggcttgtttattaattcttgtttttctcactgccaaactgagaggcaggatacatggtttgctgacaattctcctgttattaggaacaaggcaattgctctggctgttggagactggtatttcgatcgagcaggtgttaaggccattgattgtccttacccttgtgataatacatgccatcatctgattttcagatga

SEQ ID NO: 260 - protein, 664 aa, Glycine max
MRKSRDNGKPLSLVTSDSFIQFKLPAPSIPVIPLVFISVLVPLYELFFVPFARKITHHPSGITQLQRVGVGLVLSAISMAVAGIVEVKRRDQGRKDPSKPISLFWLSFQYGIFGIADMFTLVGLLEFFYRESPASMKSLSTSLTWLSTSLGYFLSTVFVNVINAVSKRITPSKQGWLHGFDLNQNNLNLFYWFLATLSCLNFFNYLYWASRYQYNVKTQALIWVCFVSETKSTYSVVLFVLICSMEMERVLWVGIAIGLVFSNWVVGYEQYHFNETELSLLEAHEASLSYAGTERNNLLLVGLTLIQNAAAKGAVCLDGTLPGYHWHRGYGSGANSWLINLEGGGWCNNIRTCVYRKKTRRGSSDFMEKEIPFTGILSNKAEENPDFFNWNRVKLRYCDGASFTGDSEDETAELQFRGQRIWAAAMEDLMSKGMRFANQALLSGCSAGGLATIIHCDEFRGLFPRTTKVKCLSDAGLFLDVIDVSGGHTLRNLYSGVVGLQGAQKNLPQICTNHLDPISCFFPQNLIASVKTPLFILNAAYDSWQIQSSLAPPSADPHGYWQQCRLNHAKCTGPQIQFLQGFRNHMLNAIKYFSRSKQNGLFINSCFSHCQTERQDTWFADNSPVIRNKAIALAVGDWYFDRAGVKAIDCPYPCDNTCHHLIFR

SEQ ID NO: 261 - DNA, 1386 bp, Glycine max
atgagaatgaagaagctgattttaatactcatagcagcatttaccttcgtttctgtggctagatctgcgtctgatcatttcttcgaaaacgatggcgtttcactggcagttgctgcaacgcccggacctccacctctcatggtccccctcactcttattcagggagctgcttccaaaggagccgtctgtttggatggaacattgcctggttaccactttcatcctggatttggatctggggcaaatagttggctcattcaattggagggaggaggatggtgtaataccatcagaagttgtgtctttagaaaaactactcgtcgtggttcctcaaaatacatggaaaaacaactagcattcacagggatattgagcaataaagctgaagaaaaccctgatttctttaactggaacagagttatagtacgttactgtgatggggcatctttcagtggagatagtcaaaatgaggctgcacagcttcaattccgaggacaaaaaatatggcaagctgcaatgcaggaattattgttcaagggaatgcagaaggccaaccaggcccttttgtccggatgctctgcgggtggtctggcatctataatacattgtgatgagttccggagcttgtttcctacatctaccaaagtgaaatgtttgagtgatgcagggtttttcctagatgcggttgacatatctgggggtcacacactgaggaatctgtttggaggtgtagttaaattacaggaggtgcaaaaaaatctgccaaacagttgtctcaaccaactggacccaacttcgtgcttttttcctcagaatttgatcaaccatgttgaaactccattgtttctactcaatgcagcttatgatgcatggcaggtccaagaaagtttggccccacattcagcagatccccatggctcttggaatgattgtaaatcaaatcatgcacgctgtaactcatctcaaattcagttcctccaagacttcagaaatcaaatgctaaatgatgtgaaaggcttctcagggacatctcaaactgggttattcataaattcttgttttgctcattgccagtctgagagacaagatacatggtttgctgatgactctccactaattaacaacatgccaattgcaattgctgttggagactggttttttgatcggaaaactgtcaaagctatcgactgtgcttacccctgtgacaatacatgccataatctggtcttcaatgctgttaaatctgctgtggtggactaccagtccacaagtgatgatgacacacctaccaataccatgaccatgatatattcccgctccacaaggctgacttttagtagtggcctatatatgctaagtattttattgccatttacatgttcctag

SEQ ID NO: 262 - protein, 461 aa, Glycine max
MRMKKLILILIAAFTFVSVARSASDHFFENDGVSLAVAATPGPPPLMVPLTLIQGAASKGAVCLDGTLPGYHFHPGFGSGANSWLIQLEGGGWCNTIRSCVFRKTTRRGSSKYMEKQLAFTGILSNKAEENPDFFNWNRVIVRYCDGASFSGDSQNEAAQLQFRGQKIWQAAMQELLFKGMQKANQALLSGCSAGGLASIIHCDEFRSLFPTSTKVKCLSDAGFFLDAVDISGGHTLRNLFGGVVKLQEVQKNLPNSCLNQLDPTSCFFPQNLINHVETPLFLLNAAYDAWQVQESLAPHSADPHGSWNDCKSNHARCNSSQIQFLQDFRNQMLNDVKGFSGTSQTGLFINSCFAHCQSERQDTWFADDSPLINNMPIAIAVGDWFFDRKTVKAIDCAYPCDNTCHNLVFNAVKSAVVDYQSTSDDDTPTNTMTMIYSRSTRLTFSSGLYMLSILLPFTCS

SEQ ID NO: 263 - DNA, 1275 bp, Glycine max
atgagaacggggaacctcttctggcttggcattgttgcagcacttgttttcagcttctgggttgatgccttttcagccaatcaatattacccccaccaccacttcaatgaaaccgagttctcttcgttggagtctcaagaacaggcacattcatccctccttgggaggactcctctcatggttggactcacccttattcaaagtgctgctgccaaaggagcagtttgcttggatggaacattgcctggttatcatttgcatcggggatatggatcaggagcaaacagctgggtcgttaatttagagggaggtgggtggtgtaatgacgttagatcatgtgtttatcgcaagaaaacacggcgtgggtcatcaacattcatggaaaaacagataccttttacaggaatattaagcaacagtgctgaagataatccagattttttcaactggaacagagtgaaaattcgttattgtgatggtgcctcttttgctggggatggtgaagataaggtggcgcaactgcaatttagaggacagcgtatttggttggctgcaatggaagatttgaagtcaaagggaatgcgatttgccaagcaggctcttctttctggatgctcggctggtggtctggctactattatacactgtgatgaattcagaggttttttcccagagactaccaaagtgaagtgtcttagtgatgcaggattatttcttgatgcgattgatgtctccaggggacataccatcaagaatttattcagtggtgttgtaaggctacagggagtgcaaaagaatctgccgcacttttgtactaatcaccttgatcccacttcgtgcttcttccctcagaatttgattgccggtattagaaccccactattcattcttaatacagcctatgactcatggcaggtccaaacaagcttagctccttcatcagcagatccccatggcttttggcatgattgtagattaaatcatgctaaatgtacttcttcacaaatccaatatttgcaaggattcaggaatcaaatgctgaatgctattaaaggcttctcaagatcacctcaaaatggattgttcataaattcatgttttgctcactgccaatctgagaggcaggatacatggtttgctgacaattctcctgtcattgggaacaaggcaattgctcttgctgttggagactggtatttcgaccgagcagttgttaaggccattgattgtccttacccttgtgataatacatgtcaccatcttgtcttcagatga

SEQ ID NO: 264 - protein, 424 aa, Glycine max
MRTGNLFWLGIVAALVFSFWVDAFSANQYYPHHHFNETEFSSLESQEQAHSSLLGRTPLMVGLTLIQSAAAKGAVCLDGTLPGYHLHRGYGSGANSWVVNLEGGGWCNDVRSCVYRKKTRRGSSTFMEKQIPFTGILSNSAEDNPDFFNWNRVKIRYCDGASFAGDGEDKVAQLQFRGQRIWLAAMEDLKSKGMRFAKQALLSGCSAGGLATIIHCDEFRGFFPETTKVKCLSDAGLFLDAIDVSRGHTIKNLFSGVVRLQGVQKNLPHFCTNHLDPTSCFFPQNLIAGIRTPLFILNTAYDSWQVQTSLAPSSADPHGFWHDCRLNHAKCTSSQIQYLQGFRNQMLNAIKGFSRSPQNGLFINSCFAHCQSERQDTWFADNSPVIGNKAIALAVGDWYFDRAVVKAIDCPYPCDNTCHHLVFR

SEQ ID NO: 265 - DNA, 1167 bp, Brachypodium distachyon
atggcgaccgattggcttttgctcctgctcctggccaccgtggccatggcgtcgccgccgccggagctaaccctcctcgccggcgcgacagagaaaggcgcagtgtgcttggatggaagcccgccggcttatcaactggacagaggcttcggctctggacgctacaactggcttgtctatctagagggaggaggatggtgcgacaccatagagagttgttcaaaacacaaaaagtccggccttggttcctctaacttgatagaagcggtacagctgcctgggattttcagtaatgaccatagacaaaattcagatttctacaactggaacaaagttttcatacggtactgcgacggggcatcattttctggggatgcagagggtgaagatcaggacggaaccaagcttttcttcagagggttgcgcatctgggaagcggttatcgatgaactcatggagaaaggacttgccaacgctaaacaggccctccttgcaggttgctcttctggtggtctagctgtgctcctgcactgtgataatttcagtgcacggtttcctcaaacggttcctgttaaatgtttttctgatgctggatttttccttgacataaaggatatttctggagaaaggttcatccgctccgtgttcagtggggttgttcatctccagaatgttagaaaagtcttgcccaaggactgccttgcaaagaaggaaccgacagattgtttctttcctgctgaggttatcaagagcatcaacacccccacgtttattctcaactctggatatgattcttggcagatacagaatgttcttgtaccagatgaaacctctcctgaaaagtcatggttgacctgcaaggctaacatccgagaatgcaaccccacacaaattgaagctctccatggattcagggagacattggtgaatgatttgaaggttgtgcaagataaggaggactggggtttgttcatcgactcatgcttcacccactgccaaacaccatttagaatctcatgggattcaccaatctccccaaggctacaaaacaagagtatcgcagaggcagttggggattggcattttgggagaagccggtcaggagtaaaacagattgactgcgagtatccgtgcaacccaacatgcagcacccagttgccttcctaa

SEQ ID NO: 266 - protein, 388 aa, Brachypodium distachyon
MATDWLLLLLLATVAMASPPPELTLLAGATEKGAVCLDGSPPAYQLDRGFGSGRYNWLVYLEGGGWCDTIESCSKHKKSGLGSSNLIEAVQLPGIFSNDHRQNSDFYNWNKVFIRYCDGASFSGDAEGEDQDGTKLFFRGLRIWEAVIDELMEKGLANAKQALLAGCSSGGLAVLLHCDNFSARFPQTVPVKCFSDAGFFLDIKDISGERFIRSVFSGVVHLQNVRKVLPKDCLAKKEPTDCFFPAEVIKSINTPTFILNSGYDSWQIQNVLVPDETSPEKSWLTCKANIRECNPTQIEALHGFRETLVNDLKVVQDKEDWGLFIDSCFTHCQTPFRISWDSPISPRLQNKSIAEAVGDWHFGRSRSGVKQIDCEYPCNPTCSTQLPS

SEQ ID NO: 267 - DNA, 1239 bp, Brachypodium distachyon
atgggttcttgggttctccttgccttggttctccggctcttcttggtgggagcagcgcgtggctccgagcagtggtcgaacgagacgcaggtctacgccaccaatggcaactccggcagcaacggcgtcttcgtcgggcttaccctcatccagtcggccgccgccaagggagctgtgtgcctggatggaagcttaccgggttaccacctacaccgggggttcggatcagggtcaaagaattggcttgtcaatctggagggcggaggctggtgcaacgatgttaagagctgtgtgttccgcaagagcagtcggcgtgggtcatcaaatcacatggaaaagcaactccagtttacagggataatgagtaacagacctgaagaaaatcctgatttctacaactggaatagagtgaaggttcgttattgtgatggtggatctttcaccggtgacggggctgatgcggcttcaggcctttatttccgaggtcagcgtatttggcaggctgctatggatgatctgatgtcccaaggaatgcgttctgctagtcaggcccttctttctggatgctctgctgggggtgcttctaccatacttcactgtgatgaattccgcggattgtttccgtcgaatactagagtcaagtgccttgctgatgctggaatgttcctcgacactgttgatgttgccggtcgtcgtgagatgagagagttcttcaacggcattgtcagattgcagggttctggaagaagcttgcctaggtcttgtacctcccgcatggacaaaacctcgtgctttttcccgcagaacgtgttaccaaacattcaaactccaacgtttattttaaacactgcttatgacgtgtggcagcttcaacaaagtgtagctcccaaaactgctgatcctcaaggtctatggcaaagatgcaagcagaatcatgccttttgtagtggcaatcaacttcagtttttaaatggctttaggaatgaaatgcttgatgccgtgaagggtttctccgggtcaaggcaaaatggtgtattcatcaactcatgcttcgctcattgccagagcgagagacaagatacatggtactcaaataactctcctcgtctcggtaacaggagaattgctgaagcagtcggtgattggttcttcgagaggggtgatgccaagtacaccgactgcacgtacccttgtgatggcacgtgccatcaccttgtgttcagggggaggggactgtaa

SEQ ID NO: 268 - protein, 412 aa, Brachypodium distachyon
MGSWVLLALVLRLFLVGAARGSEQWSNETQVYATNGNSGSNGVFVGLTLIQSAAAKGAVCLDGSLPGYHLHRGFGSGSKNWLVNLEGGGWCNDVKSCVFRKSSRRGSSNHMEKQLQFTGIMSNRPEENPDFYNWNRVKVRYCDGGSFTGDGADAASGLYFRGQRIWQAAMDDLMSQGMRSASQALLSGCSAGGASTILHCDEFRGLFPSNTRVKCLADAGMFLDTVDVAGRREMREFFNGIVRLQGSGRSLPRSCTSRMDKTSCFFPQNVLPNIQTPTFILNTAYDVWQLQQSVAPKTADPQGLWQRCKQNHAFCSGNQLQFLNGFRNEMLDAVKGFSGSRQNGVFINSCFAHCQSERQDTWYSNNSPRLGNRRIAEAVGDWFFERGDAKYTDCTYPCDGTCHHLVFRGRGL

SEQ ID NO: 269 - DNA, 1326 bp, Brachypodium distachyon
atgccgcctctctccaccgcctccgcgccggcgacgcaccagctgcgcctctggtggcgccggctcggccgccgcggcgccgccggggcggcattcggggccgcgctcctcgccgccgccttcttcctcaccctctcccgctacgcttccgtcccatccacctcttcttccacctccccgtcctacggccaccgcctccccacgctcgtcgacctcaccctcgtcgacggcgccaaggacaagggcgcagtgtgcttggatgggacgccgcctggataccattggctcccgggattcggggatggatccgacaaatggctcctccacttggagggtggaagctggtgcaggaatttgacatggtgtgcccagcgtaagaagactagtcttggttcctccgcatacatggagagacgggccgagttcgttggcatcttgagcgacgatgaattgcagaatccagatttttacaattggaataaagtgaaggtaaggtattgtgatggagcttcgttttctggaaacgttgaagaggaattacaggatggcaccagtttcttcttcagaggtcagcgtatctgggaagcagttatgagtgaacttctatcgaagggtctatcccgtgctaaagaggcttttctaacggggtgctcggctgggggtctatccacttacattcactgtgatgactttcgtgcccttgtaccaaaggcatctactgttaagtgtcttgcggatggtggtttttttcttgacgtagaagacgtttctgggagaaggtatatgcggggattttacaatgatgttgctcgcctacaggatctgcggaaaaagtttcctcgttgcagttcaaatatggagccagggcagtgtatttttccacgcgaagttgcaaaaggcatcagcaccccaatgttcattctcaatccagcatatgatgtttggcaggttgaacatgttttgtctccagaagggtctgacaccgaacgtttgtgggaaagttgcagattggatattactaaatgtgattctaaacagcttgaaactctacaaggtttccgaaaagagttgcttgatgctataagtgaatacaagaagagaaaagactggggcatgttcatcaactcctgctttatacactgtcagtcaatgaatgccttgacttggcactctccatctggccctagaatgaatggcaagaccatcgctgaatcagtgggagactggttctttaaccggagagaggtgaaggaaatagactgtgaatacccctgcaacccgacatgccacaatgccattctcagccaggcgtacaaggaagaatga

SEQ ID NO: 270 - protein, 441 aa, Brachypodium distachyon
MPPLSTASAPATHQLRLWWRRLGRRGAAGAAFGAALLAAAFFLTLSRYASVPSTSSSTSPSYGHRLPTLVDLTLVDGAKDKGAVCLDGTPPGYHWLPGFGDGSDKWLLHLEGGSWCRNLTWCAQRKKTSLGSSAYMERRAEFVGILSDDELQNPDFYNWNKVKVRYCDGASFSGNVEEELQDGTSFFFRGQRIWEAVMSELLSKGLSRAKEAFLTGCSAGGLSTYIHCDDFRALVPKASTVKCLADGGFFLDVEDVSGRRYMRGFYNDVARLQDLRKKFPRCSSNMEPGQCIFPREVAKGISTPMFILNPAYDVWQVEHVLSPEGSDTERLWESCRLDITKCDSKQLETLQGFRKELLDAISEYKKRKDWGMFINSCFIHCQSMNALTWHSPSGPRMNGKTIAESVGDWFFNRREVKEIDCEYPCNPTCHNAILSQAYKEE

SEQ ID NO: 271 - DNA, 1374 bp, Brachypodium distachyon
atggcggacaccgagcagccgctcctcctagtcctaccgcagcggcatcgtcgaccagccaaccgcgccgccgcctggggattcgccgcggcggtcctcctcctcctgctgctggtggccgcggccccgggccctctccgccgcagcagcaggatgccggagcccgtcgcgctgaccctcctcgctggcgcccgggagaagggagcagtgtgcttggatggaaccccgccgggttaccacctgatcagagggtccggctccggatccaacagctggctcgtccatctagagggaggaggctggtgcagcactgtcaaggattgctccaatcgcaggatgtcccagctcggttcatccaacttcatgaaaccgttgcagtttgccggcgctgggatatttggcagtgaccagctacagaatcctgatttctacaactggaacagagtctatgttcggtattgtgacggggcgtcgttttctggagatgcagagggtcaagctcaggatggaaccacacttcacttcaaaggattgcgcatttacgaagcggttattgacgaactcatgggaaaaggactagccaatgctacacaggtcctccttacaggttgttctgctggtggtctggctacgatactgcattgtgatgatttcagtgcacggtttccccatgaagtttcagttaaatgccttgctgatgctgggttttttcttgacgtaaaggatatatctggacaaaggtccttttggtctgtctacaatggtgttgttcacctgcagaatgttagaaaagtgttgcccaaggactgcctcgcaaacaaggagccgacggagtgtttctttccagccgaacttattaagagcatccacacccccatatttattctcaactctggatatgactcatggcagatacaatatgttcttgtgccaggctcatctgctcctgataagtcatggttgagttgcagggaaaacctcgcaaactgcaattccacccaaatcaaagtcctcgatggattcaggaatacaatggtcgatgacttgaaggtcgtcgttgaagataagcaggactggggattgttcatcgactcatgcttcacccactgccagactctttctggcacctcatggaattcaccagtctcaacaagacttggaaacaagagtattgcagaggctgttggagattggcactttggaagaagcaaaagagtgaaagagattgactgcctgtatccatgcaaccccacatgcagcagccccacatggccgtctgcctcattctctactatcggtggcgaacccaaaattttaggtgtggcggagacgacgagaaaatcgactttgagcaatgagcaaatattcatgtaa

SEQ ID NO: 272 - protein, 457 aa, Brachypodium distachyon
MADTEQPLLLVLPQRHRRPANRAAAWGFAAAVLLLLLLVAAAPGPLRRSSRMPEPVALTLLAGAREKGAVCLDGTPPGYHLIRGSGSGSNSWLVHLEGGGWCSTVKDCSNRRMSQLGSSNFMKPLQFAGAGIFGSDQLQNPDFYNWNRVYVRYCDGASFSGDAEGQAQDGTTLHFKGLRIYEAVIDELMGKGLANATQVLLTGCSAGGLATILHCDDFSARFPHEVSVKCLADAGFFLDVKDISGQRSFWSVYNGVVHLQNVRKVLPKDCLANKEPTECFFPAELIKSIHTPIFILNSGYDSWQIQYVLVPGSSAPDKSWLSCRENLANCNSTQIKVLDGFRNTMVDDLKVVVEDKQDWGLFIDSCFTHCQTLSGTSWNSPVSTRLGNKSIAEAVGDWHFGRSKRVKEIDCLYPCNPTCSSPTWPSASFSTIGGEPKILGVAETTRKSTLSNEQIFM

SEQ ID NO: 273 - DNA, 1236 bp, Brachypodium distachyon
atgggtgagaaggtcgggatggcgagcaagcttttggagcgttttcttctggttcttgtagtcctcgttgcaaccacgcaggcggcggcggatgggcacaagagtgccggcggtgcaaggaggcgtgcgacggcggagccgccggtgcccatcaccatcctcacatccgccgtcgaaaagggagccgtgtgcctggacgggtcgccgccggcgtaccatctggaccggggttccgggtccggcaggaacagctggatcgtgaacctggagggaggcgggtggtgcgacagcgtcctctcctgcgggtggcgcaaagggggctacctcgggtcgtcgctccacatggacaagcccatgttcttcgggggcatcatgagcgccagcgccgtcgacaacccggatttctacaactggaaccgggtgatggtccggtactgcgacggcgggtcattcgcgggcgaaggcttggaccgggccaccggggtctgcttccggggccagcgcatctgggacgccgccgtccgccacctgctctccatcgggatggcctctgcagaccgtgcgctgctgacgggctgctccgcggggggtctggcggcgatgctgcactgcgaccagttcagcgccttcttcgccgggaagaacaccaccgtcaagtgcctcgccgacgcgggactcttcctcgacgccgtggacgtctccgggggccgtagcctgagatcctactttcagggcgtcgtggccacgcatggagtggctcagaacctgccgtcgtcttgcaccggccatcttgacgccacctcgtgcttcttcccgcagaatataatcggcaacatcaagaccccaatcttcctgttaaatgcagcctacgatacctggcagctccgggaaagcctggccccgaacggagctgaccacaacggcgcctggcgagcctgcaagctcaaccgtacagcctgcaatgaatcccaactgacattccttcgaagtttcagggaccagatggtggcgactgtgaaggacttctcgggttccagaagcaacgggctcttcattaactcgtgcttcattcacgggcagtccgagatgtgggcaacatggaatgcacctggctctcctgccattggaaacaagggtatcggcaaatcagtgggcgactggtactttggccgggctcaagtgaaggccatcgactgcccctacccctgcgacaacacatgccatcacgacatatga

SEQ ID NO: 274 - protein, 411 aa, Brachypodium distachyon
MGEKVGMASKLLERFLLVLVVLVATTQAAADGHKSAGGARRRATAEPPVPITILTSAVEKGAVCLDGSPPAYHLDRGSGSGRNSWIVNLEGGGWCDSVLSCGWRKGGYLGSSLHMDKPMFFGGIMSASAVDNPDFYNWNRVMVRYCDGGSFAGEGLDRATGVCFRGQRIWDAAVRHLLSIGMASADRALLTGCSAGGLAAMLHCDQFSAFFAGKNTTVKCLADAGLFLDAVDVSGGRSLRSYFQGVVATHGVAQNLPSSCTGHLDATSCFFPQNIIGNIKTPIFLLNAAYDTWQLRESLAPNGADHNGAWRACKLNRTACNESQLTFLRSFRDQMVATVKDFSGSRSNGLFINSCFIHGQSEMWATWNAPGSPAIGNKGIGKSVGDWYFGRAQVKAIDCPYPCDNTCHHDI

SEQ ID NO: 275 - DNA, 1314 bp, Brachypodium distachyon
atgtcgccgtcgtcggccccggcgagccgccgccacctgcgcctctggtggcgccgtcgcggccgtgccggcgccgtcgccgccaccttcgccgccgcgctcctcgccgcggggctcctcctcgcgctctcctactacgcctccgtcgtggcgccccgcgcggccccctcctcctcctcctcctcctccggcgctctcgtcgatctcactcttctccgccgagccgagaagaagggcgcgctgtgcttggacggaagcgcgccagggtaccatctgcagagaggctctggcagtggctctcagagctggctcatccacctggagggtggaggctggtgcagaaatttgaagtcatgtgcttcacgccagaaatcaatgttgggttcttcccggtacatggaacgtcaggttgagtttgccgggatcttgagtgatgacgaagctcaaaatccagatttttatgactggaataaagtgaagataaggtattgcgacggggcatcattttctgggaacgtcaaagatgagtttcagaacggcacaaaattctttttcagaggccagcgtatctggaaagcagttatggatgaacttctactgaaggggctcaaacatgctaaacaggcttttctaacaggatgctctgctggtgggttagccacttacattcactgtgatgattttcgtgcactgctgccaaaagattctagggttaagtgtcttgcggatggtggttttttccttgatgtagaagacatttccaagcaaagaaccttgcgggctttctatagtgaagttgtccgtcttcaggatctcaagaggaggtttttgcactgcagttcaagcgaggatccaggccagtgcttctttccacgtgaagttgttaaagccatccatacaccagtatttgttcttaatccagcatatgacgcctggcaggtacaacatgtgttggcaccagaagcatcggaccctaaacattcatggttagactgtaggttggatattagcaagtgcaatcctaaccaacttaaaattctccaaggttttagggaagaactacatgttgctatgagtgaactcaagcagaaaaaagactggggtatttttattgactcctgctttgtacactgtcagtcgctaaactccttgacatggcactctccgtcttctcctagagtcagtaacaagaccatcgcagaagcagtaggggactggttctttgacaggagagaggtgaaggagctagattgtgaatatccctgcaacccgacgtgccacaacctggtttttgataagcctttcaagggatga

SEQ ID NO: 276 - protein, 437 aa, Brachypodium distachyon
MSPSSAPASRRHLRLWWRRRGRAGAVAATFAAALLAAGLLLALSYYASVVAPRAAPSSSSSSSGALVDLTLLRRAEKKGALCLDGSAPGYHLQRGSGSGSQSWLIHLEGGGWCRNLKSCASRQKSMLGSSRYMERQVEFAGILSDDEAQNPDFYDWNKVKIRYCDGASFSGNVKDEFQNGTKFFFRGQRIWKAVMDELLLKGLKHAKQAFLTGCSAGGLATYIHCDDFRALLPKDSRVKCLADGGFFLDVEDISKQRTLRAFYSEVVRLQDLKRRFLHCSSSEDPGQCFFPREVVKAIHTPVFVLNPAYDAWQVQHVLAPEASDPKHSWLDCRLDISKCNPNQLKILQGFREELHVAMSELKQKKDWGIFIDSCFVHCQSLNSLTWHSPSSPRVSNKTIAEAVGDWFFDRREVKELDCEYPCNPTCHNLVFDKPFKG

SEQ ID NO: 277 - DNA, 1263 bp, Brachypodium distachyon
atggcggacgccgatcagccgctcctccgccatggccgtcgaccaccagcagccagccgcgccgccgcctgtgtcgccgcggccctgcttctggccgccgccgccaccggccttcttctccgtcgcagcagcagcaggctgccggagcccgtcgcactgaccctcctcgccggcgcccaagagaagggagcagtgtgcttggatggaaccccggcggcgtaccatctgctgagaggctccggcgccggatccaacagctggctcatccacctagagggaggaggctggtgcagcaccgtcagtgagtgttccaatcgaaggatgtcccagcttggatcatccaaattcatgaaaccgttgcagtttggcggttacgggatcctcggcagcgatcagctacagaatcctgatttttacaactggaacagagcctatgtaaggtactgcgacggggggtcgttttctggggattcggaaggtcaagctcaggatggaaccacactccacttcagaggattgcgcgtctacgaagcggtcatcgatgaactcatgggaaaaggactcgccaacgccacacaggccctccttacaggctgttctgctggtggtcttgctacgatactgcattgcgatgattttagcgcacggtttccacacaaagtttcagttaaatgccttcccgatgccgggttttttcttgacgcgaaggacatatctggagaaaggtccttttggtctgtctacgatggagttgttcacctccagaatgttaaacaagtgttgcccaaggactgccttgccagcaaggagccgacagagtgtttcttcccggcagagattatcaagagcatccgcaccccaatgtttattctcaactctgcatatgattcatggcagatacagaatgttcttgtgccaggttcatctgctcctgacaagtcctggctgagttgcaagggcaacataataaactgcaactccacacagattgaagtcctgcatggattcaggaacgccatggtcgatgacttgaagttggtcgtcgaagataagcaagattggggcctgttcatcgactcctgcttcacccactgccagactctttttggaatctcatggaactcaccaatctccccgaggctcggaaacgagagcattgcagaggctgtcggaaattggtactttggaaggagcaaaagagtgagggagattgactgccaatatccctgcaaccccacatgcagcagccggctgcctcggtga

SEQ ID NO: 278 - protein, 420 aa, Brachypodium distachyon
MADADQPLLRHGRRPPAASRAAACVAAALLLAAAATGLLLRRSSSRLPEPVALTLLAGAQEKGAVCLDGTPAAYHLLRGSGAGSNSWLIHLEGGGWCSTVSECSNRRMSQLGSSKFMKPLQFGGYGILGSDQLQNPDFYNWNRAYVRYCDGGSFSGDSEGQAQDGTTLHFRGLRVYEAVIDELMGKGLANATQALLTGCSAGGLATILHCDDFSARFPHKVSVKCLPDAGFFLDAKDISGERSFWSVYDGVVHLQNVKQVLPKDCLASKEPTECFFPAEIIKSIRTPMFILNSAYDSWQIQNVLVPGSSAPDKSWLSCKGNIINCNSTQIEVLHGFRNAMVDDLKLVVEDKQDWGLFIDSCFTHCQTLFGISWNSPISPRLGNESIAEAVGNWYFGRSKRVREIDCQYPCNPTCSSRLPR

SEQ ID NO: 279 - DNA, 1263 bp, Brachypodium distachyon
atgaaggcgaggattcgtgccgtgaggccttggctgcctcttgctcttcttctcctcgtcctcgtcctcagctgcgtggcgcaggcggcagtcaacgagcaagccaacggcggcggcaggaggagaaggaggagcccccggcgttccacggcggcggccgacgggatggtgcctatcaccctcctcaaatccgccgcagagaagggagccgtgtgcatggatgggacacctcccgcgtaccacctggacccgggctccggagcaggcaacaacagttggatcgtcaaccttgagggaggcgggtggtgcaacaacgctcggacgtgcaagttccgcacgcgcacccgccacggctcctccgactacatggagcgccacatcacattcagcggcatcatgagcgccagccccgcctctaaccctgacttctacagctggaaccgggtgaagattcgctactgcgacagcgcgtctttcgccggcgacaacttcgacaagggcaccgggctctatttcagaggccagcggatctgggacgccgccatccaacacctcctctccattggaatggcatcggctgatcaggtgctcctgacgggctgctccgccggtggcctggcggcgatactgcattgcgaccagttcagcgccttcttcgccggcaagaacaccaccgtcaagtgcctcgccgacgcaggcctcttcctcgacgcactggatgtctccgggggccgcagcttgagatcctactacggcgaaatcgtagccatgcaggaagtggcccggaacctgccgcccagctgcaccggtcatctcgacgccacctcgtgcttcttccctcagaacgtaatcgacagcatcaagacccccatcttcctgctaaacgcagcctacgacgcctggcagatcgaggaaagcctggccccaaacagagctgaccccagcggtgcgtggcgagcctgcaagtacaaccgctcagcctgcgacgcgtctcagatcaagttcctgcaaagtttcagggaccagatggtggcatccgtgaaagccttctccggttccaggagcaacgggctcttcatcaactcgtgcttcgcccactgccagtccgagctgccggccacctggaacgacgcccctggctcccctgcagtccagaacaaggggatcgcgaaatcagtgggcgactggtattttggccgggctgaagtgaaggccatcgattgcccctacccctgcgacaacacatgtcgtcacatcatatga

SEQ ID NO: 280 - protein, 420 aa, Brachypodium distachyon
MKARIRAVRPWLPLALLLLVLVLSCVAQAAVNEQANGGGRRRRRSPRRSTAAADGMVPITLLKSAAEKGAVCMDGTPPAYHLDPGSGAGNNSWIVNLEGGGWCNNARTCKFRTRTRHGSSDYMERHITFSGIMSASPASNPDFYSWNRVKIRYCDSASFAGDNFDKGTGLYFRGQRIWDAAIQHLLSIGMASADQVLLTGCSAGGLAAILHCDQFSAFFAGKNTTVKCLADAGLFLDALDVSGGRSLRSYYGEIVAMQEVARNLPPSCTGHLDATSCFFPQNVIDSIKTPIFLLNAAYDAWQIEESLAPNRADPSGAWRACKYNRSACDASQIKFLQSFRDQMVASVKAFSGSRSNGLFINSCFAHCQSELPATWNDAPGSPAVQNKGIAKSVGDWYFGRAEVKAIDCPYPCDNTCRHII

SEQ ID NO: 281 - DNA, 1188 bp, Brachypodium distachyon
atggcgaatgatggaagcaagctccgtctctggtgctcggcctttgcctgcgcgctggcgtttctcggggcggacggctttttcgtggacatcacctacgtcgacagcgcggtggccaaaggagcagtgtgtctggatgggagcgccccggcgtatcatctcgcccgaggcttcggctccggggtggacagctggttggttcatttcgagggaggaggatggtgcagcaatgtgacgacatgcctggagcggaagaacacccggttagggtcatccaaggagatggccaagcaggttgctttctctgggattttgagcaacaccccagatcacaacccagacttctacaattggaacaaggttcgggttcggtactgcgatggctcctctttcaccggagataaggaagaagttgatcctacgacaaagctgcactacagaggtgcgagggtgtggcaagcagtgatggaggacctgctcgcaaaaggaatggacagagctgaaaatgctttgatatcgggatgctctgccggtggattaacttccgtactacattgtgacagattccgtgatcgtatgccagtggaggccaatgttaaatgtctttctgatgctggtttcttcatcgacgtgaaggatattgctggagagaagcatgctgctgactttttcaacgatgtagtcacaacacatggttcagccaagaatttaccatcttcctgcacttccaagttgcctccaggcatgtgcctttttcctcagaatgaggtgaaacagattcagacacctttgttcatcctaaatgcagcatatgattcatggcaggtaaggaacattttggtgccaggaggttctgatcctcattggcgaagctgcaagcacgacataaatcaatgttcagagaagcaacttaagaccttacagggattcagggacgattttctgaaagcactggaagaacaagggagctcttccagcagagggttgttcataaactcatgctttgcgcactgccagtcggagatacaggagatatggtttgcgcccgattccccagtactcggaaacaaaaaaatagcaaatgcaattggggactggttctatgaccgcagtccgtttcaggagattgactgcccttatccttgtgattcaagttgccatgtcttcaagaattcctcggagacatag

SEQ ID NO: 282 - protein, 395 aa, Brachypodium distachyon
MANDGSKLRLWCSAFACALAFLGADGFFVDITYVDSAVAKGAVCLDGSAPAYHLARGFGSGVDSWLVHFEGGGWCSNVTTCLERKNTRLGSSKEMAKQVAFSGILSNTPDHNPDFYNWNKVRVRYCDGSSFTGDKEEVDPTTKLHYRGARVWQAVMEDLLAKGMDRAENALISGCSAGGLTSVLHCDRFRDRMPVEANVKCLSDAGFFIDVKDIAGEKHAADFFNDVVTTHGSAKNLPSSCTSKLPPGMCLFPQNEVKQIQTPLFILNAAYDSWQVRNILVPGGSDPHWRSCKHDINQCSEKQLKTLQGFRDDFLKALEEQGSSSSRGLFINSCFAHCQSEIQEIWFAPDSPVLGNKKIANAIGDWFYDRSPFQEIDCPYPCDSSCHVFKNSSET

SEQ ID NO: 283 - DNA, 1266 bp, Brachypodium distachyon
atggctcggcggcggccgcgctggacgtgggcggcggtctttatcgctggtgttctcgtcgtctctgcttctgtttctacggcggcggcggcggcggcggcagaggaggaggagaagaagctgctggtggacatgacgctcgtcccggacgccgcgtccgcgggagcagtgtgcctggacgggagcccgccggcgtaccacctggaccgcggcgccggctccggcgccggctggctgctgcagttcgagggcggcgggtggtgcaacgacgcgcggtcgtgcgccgagagggccgggacgcgcagaggctccacgcgcctcatgaacaagctcgaggtcttctccggcgtgctcagcgacgatccggccaagaacccagatttttacaactggaatcgagtgaagctgcggtactgcgacggcggctccttcgccggtgattcagagttcataaacggtacttcaatcatctacatgagagggcagaggatatgggatgctatcatcaccgatctctttcgaaaaggccttgcgacagcccaacaggtactgctctcaggctgctcagcaggaggcctggcgacattcttccactgcgacgacctccaggagcgtcttggaggtgccaccacggtgaaatgcatgagtgacgctgggtttttccttgatgtggatgacatttcaggcgacaataccattagacctttctttagcagtctagtcgatctgcagggagctcaaaagaatttgaacaaagaatgtttgaattcgatgctctatccttatcagtgctttttcccacaatatgcgcttcaaaacataagaaccccctatttcatcttgaattcagcttacgacgtatatcagttccatcacacatttgtgcctccttcttgtgatcctagaggtcagtggagccgctgtaaatcagaccctgcggcatgcagcacatcccaaattgcaactctccaaggcctgagaaatgcaatgttaacggctctaaacctgttcgaaggcgattcgaaggtggggatgttcatcaattcttgttttgcacattgccagagcgagctgcaggacacatggtttgcaccaaattccccaagtctacacaataagacaattgcagagctggttggggattggtactttgaaaggggtgctgcccaagaaattgactgcgcttatccctgtgacttgacgtgtcacaacattataccaactggttatccttttgacagggttaaagaaattcccgaattttaa

SEQ ID NO: 284 - protein, 421 aa, Brachypodium distachyon
MARRRPRWTWAAVFIAGVLVVSASVSTAAAAAAAEEEEKKLLVDMTLVPDAASAGAVCLDGSPPAYHLDRGAGSGAGWLLQFEGGGWCNDARSCAERAGTRRGSTRLMNKLEVFSGVLSDDPAKNPDFYNWNRVKLRYCDGGSFAGDSEFINGTSIIYMRGQRIWDAIITDLFRKGLATAQQVLLSGCSAGGLATFFHCDDLQERLGGATTVKCMSDAGFFLDVDDISGDNTIRPFFSSLVDLQGAQKNLNKECLNSMLYPYQCFFPQYALQNIRTPYFILNSAYDVYQFHHTFVPPSCDPRGQWSRCKSDPAACSTSQIATLQGLRNAMLTALNLFEGDSKVGMFINSCFAHCQSELQDTWFAPNSPSLHNKTIAELVGDWYFERGAAQEIDCAYPCDLTCHNIIPTGYPFDRVKEIPEF

SEQ ID NO: 285 - DNA, 1176 bp, Brachypodium distachyon
atggcttctccgacggcggtggcggcgatgatggcgacgctggtgctgggtctcgcggcggtggctgccgcgggcgacgtggaaatggtgttcctgaaaagtgcagtggccaaaggagcagtgtgcctggatgggagccctccggtttaccacttctcccctggctccggctccggcgccaataactgggtggttcacatggagggaggagggtggtgcaagacctccgaagagtgctccatccggaagggcaacttcaggggctcgtccaaatacatgaagccactctcgttttcagggatattagggggcagcgacaaattcaatcctgatttctacaactggaacagagtgaaggtcagatactgcgatggttcgtcgtttaccggtgatgttgaggcagtagaaacttcaacaaacctgcactacagagggaacagagtttggcaagccatcatccaagatctacttgacagggggatgagcaaggcacaaaatgctcttctctctggatgttcagctggaggtctagcagcaatactgcattgtgacagattcagtgacctgcttccggcatcggcaaaggtcaagtgcttttctgatgctggttacttttttgatgggacagatatcaccggtaacaattacgttagaaaatcctacaaggatattgtaaacctacatggatcagctaaaagtctgccatcttcatgtacatcgaagcgatcacctgaattgtgcttcttcccgcagtatgtcatcccgacattgcgcacaccgctgttcatacttaatgcagcatatgatacatggcagatcaggaacatcctagcgcctaatgcggctgatccaaagaagacatgggccaaatgcaagcttgatataaagagctgctcctccagccaactcgtgaccttgcaaaatttcaggaaagactttttggcagctcttcctcaaccgggacagtctccttctctaggcatttttatagactcatgctttgctcactgccaatctggagcccaagatacatggattggcgaaggttctccttccattcaaaagatgagaattggaaaagcggtgggggactggttctacaaccggcatgtatctcagttgattgactgcccgtatccctgcaacccaacctgcaagaaccgtgaagaagactga

SEQ ID NO: 286 - protein, 391 aa, Brachypodium distachyon
MASPTAVAAMMATLVLGLAAVAAAGDVEMVFLKSAVAKGAVCLDGSPPVYHFSPGSGSGANNWVVHMEGGGWCKTSEECSIRKGNFRGSSKYMKPLSFSGILGGSDKFNPDFYNWNRVKVRYCDGSSFTGDVEAVETSTNLHYRGNRVWQAIIQDLLDRGMSKAQNALLSGCSAGGLAAILHCDRFSDLLPASAKVKCFSDAGYFFDGTDITGNNYVRKSYKDIVNLHGSAKSLPSSCTSKRSPELCFFPQYVIPTLRTPLFILNAAYDTWQIRNILAPNAADPKKTWAKCKLDIKSCSSSQLVTLQNFRKDFLAALPQPGQSPSLGIFIDSCFAHCQSGAQDTWIGEGSPSIQKMRIGKAVGDWFYNRHVSQLIDCPYPCNPTCKNREED

SEQ ID NO: 287 - DNA, 1209 bp, Medicago truncatula
atggtgaaccttttctgggtttgcattgtaatagcacttgttttcaccaactgggttgatgcaaatgcatattatcacatcaatgaaactgaactctctatcttagaagctcatgaagcttcttctttttcttcacttgtggctcagcctcacatggttggaataacccttattcaatctgctgctgctaaaggagctgtctgcttggatggaacattgcctgcttatcattttgatcacggatacggatccggtgcaaacagctggcttgttaatttagagggaggtggttggtgtaataaccgtagaacttgcgtctatcgcaagacaacacggcgtggatcatcaaaattcatggaaaaagcgataccttttacttggaatattaaagtgaaaattcgttactgtgatggtgcctcttttaccggggatagtgaagataaggctgcgcagttgcaattcagaggacagcgcatttggttggctgcagtggaggatttgatgtcaaaaggaatgcgttttgccaagcaggctcttctttctggatgctcagctggtggtcttgctactattttacactgcgatgaatttcgaggtcatttcccaaggactaccaaagtgaagtgcctcagtgatgctgggttatttcttaatgctgttgatgtagctggtgggcataccctcaggaattttttcaacggtgttgtcaccctacagggagcgcagaagaatcttccacgcgtttgtactaatcatcttgatcccacttcgtgcttctttcctgagaacttgattgccagtgtcagaaccccgctattcattcttaatactgcctatgactcgtggcagatccagtcaagcttagctccttcatcggccgatccccacggcaattggcgtgaatgcagattaaaccataataaatgttccggttcacaaatccaatttctgcaaggattcaggaatcacatggtgaatgttgtgagaggcttctcaagatcaagtcaaaatggattgttcataaattcatgctttgctcactgccaatctgagaggcaagacacatggtttgctgacaactctcctgtcataggaaacaaggcaattgctctggctgttggagactggtattttgaccgagccgcagttaaggacattgattgtccttacccttgtgataacacatgccaccatttggttttcagatga

SEQ ID NO: 288 - protein, 402 aa, Medicago truncatula
MVNLFWVCIVIALVFTNWVDANAYYHINETELSILEAHEASSFSSLVAQPHMVGITLIQSAAAKGAVCLDGTLPAYHFDHGYGSGANSWLVNLEGGGWCNNRRTCVYRKTTRRGSSKFMEKAIPFTWNIKVKIRYCDGASFTGDSEDKAAQLQFRGQRIWLAAVEDLMSKGMRFAKQALLSGCSAGGLATILHCDEFRGHFPRTTKVKCLSDAGLFLNAVDVAGGHTLRNFFNGVVTLQGAQKNLPRVCTNHLDPTSCFFPENLIASVRTPLFILNTAYDSWQIQSSLAPSSADPHGNWRECRLNHNKCSGSQIQFLQGFRNHMVNVVRGFSRSSQNGLFINSCFAHCQSERQDTWFADNSPVIGNKAIALAVGDWYFDRAAVKDIDCPYPCDNTCHHLVFR

SEQ ID NO: 289 - DNA, 1305 bp, Medicago truncatula
atgattcataattcgttttctgttacgatgaacttcgcggtggcgtttgcattattctatctaatcacggtggagtcatggcgtgttcactcacaagaaccgaagaagctttatgtgaacatgactctcgttaacaacgcacgcgaaaccggtgctttttgtttggatggaagtttaccggcgtatcatttggatagaggatttggagctggtgaagacaattggcttctacaatttgagggaggtggttggtgcaatgacttgaaatcatgcttggagagagcaaaaactcgcaggggttcaacaaattacatgaccaaatatgagaccttcaatggtattttaagcaacaatgctaccgttaatccagacttttacaattggaacagggtgaagctgagatactgtgatggagcttcatttacgggaaacaaagtgttcaataatgggacaacaaagctttacttcaaagggcaaaagatttgggaagcccttattgccgaccttctgccaaaaggtttaggaaaggcacgcaaggctttgctttcaggctgctcagcaggaggtttggccacctttcaccattgtgacaatttcaccaagtatttgccaaccaatgctagtgttaaatgcttgagtgatgcaggttttttccttgatggaagagatgtcagtttgaaccacaccatgagatactttttcaaaagtgtagttaggttgcaggggtcagtacagaacttgaataaaaattgcaccagtgcgatgccttcttatccagacctatgcttctttccacaatatgtgttgaaatatatatcaacaccatattttatcttgaactctgcctatgatgtattccaattccataatatattggtgccaccttcaactgatccccgcgggcactggatccactgcaagaaggacccagcggcatgcacaccaaccgaaattaatacattgcaaggttttaggctcagcatgattgctgctttgaaacccttctacttttattcaaacagcgggggaatgtttataaattcatgttttgctcattgccaaagtgaatcacaagatacatggtctggagctgattctccaaaaataaaaaacacgactattgcagaagcagtcggtgattggtattttagtagaaacagaagcaaggcaatagactgtccatatccatgtgatacaacttgtcgtaatttgatacctgcacctgtcatttggaagatcagactggaattttttccaacaagctttccagttctcctatctgaggtccctgaagtaaaaggatag

SEQ ID NO: 290 - protein, 434 aa, Medicago truncatula
MIHNSFSVTMNFAVAFALFYLITVESWRVHSQEPKKLYVNMTLVNNARETGAFCLDGSLPAYHLDRGFGAGEDNWLLQFEGGGWCNDLKSCLERAKTRRGSTNYMTKYETFNGILSNNATVNPDFYNWNRVKLRYCDGASFTGNKVFNNGTTKLYFKGQKIWEALIADLLPKGLGKARKALLSGCSAGGLATFHHCDNFTKYLPTNASVKCLSDAGFFLDGRDVSLNHTMRYFFKSVVRLQGSVQNLNKNCTSAMPSYPDLCFFPQYVLKYISTPYFILNSAYDVFQFHNILVPPSTDPRGHWIHCKKDPAACTPTEINTLQGFRLSMIAALKPFYFYSNSGGMFINSCFAHCQSESQDTWSGADSPKIKNTTIAEAVGDWYFSRNRSKAIDCPYPCDTTCRNLIPAPVIWKIRLEFFPTSFPVLLSEVPEVKG

SEQ ID NO: 291 - DNA, 1614 bp, Medicago truncatula
atggataatcaattcacattcatgcgtacactcccttctccatttctcatccatcttcaccgcacaactaacccaaacttcataagaagattcaattggtcatttgtctcaatttccaaaccaatgtttaatctttactcttcttccttcacttcttctcaatctgctgctgaggaagatcacaacgacgggaacaacgacactaacggcacctcttctttccgcaacttcaagctcaatcagtccacttttttggcttctcttatgcctaaaacggaaattggtgtcgatcgtttcctccattcgtatccacactatgatggacgcggtgttctcatcgctatttttgaattggaatcaagtggaaaaactatgattcataattcgttttctgttacgatgaacttcgcggtggcgtttgcattattctatctaatcacggtggagtcatggcgtgttcactcacaagaaccgaagaagctttatgtgaacatgactctcgttaacaacgcacgcgaaaccggtgctttttgtttggatggaagtttaccggcgtatcatttggatagaggatttggagctggtgaagacaattggcttctacaatttgagggaggtggttggtgcaatgacttgaaatcatgcttggagagagcaaaaactcgcaggggttcaacaaattacatgaccaaatatgagaccttcaatggtattttaagcaacaatgctaccgttaatccagacttttacaattggaacagggtgaagctgagatactgtgatggagcttcatttactggaaacagagtgttcaataatgggacaacaaagctttacttcaaagggcaaaatatttgggaagccattattgccgacattctgccaaaaggtttaggaaaggcacgcaaggctttgctttcaggctgctcagcaggaggtttggccacctttcaccattgtgacaatttcaccaagtatttgccaaccaatgctagtgttaaatgcttgagtgatgcaggttttttccttgatggaagagatgtcagtttgaaccacaccatgagatactttttcaaaagtgtagttacgttgcaggggtcagtacagaacctgaataaaaactgcaccagtgcaatgtcttcttatccagacctgtgcttctttccacaatatgtgttgaaatatatatcaacaccatattttatcttgaactctgcctatgatgtattccaattccataatatattggtgccaccttcagctgatccccacgggcactggaaccattgcaagaaggacccagcggcatgcacaccaaccgaaattaatacattgcaaggttttaggctcagcatgattgcagcttcgaaacccatctacttttattcaaacagagggggaatatttataaattcatgttttgctcattgccaaagtgaatcgcaagatacatggtctggagctgattctccaagaataataaacacgactattgcagaggcagtcggtgattggtatttttgtagaaacaaaagcaaggcaatagactggccatatccatgcgatacaacttgtcgtaatttgatacctgtattacataatttaataccttaa

SEQ ID NO: 292 - protein, 537 aa, Medicago truncatula
MDNQFTFMRTLPSPFLIHLHRTTNPNFIRRFNWSFVSISKPMFNLYSSSFTSSQSAAEEDHNDGNNDTNGTSSFRNFKLNQSTFLASLMPKTEIGVDRFLHSYPHYDGRGVLIAIFELESSGKTMIHNSFSVTMNFAVAFALFYLITVESWRVHSQEPKKLYVNMTLVNNARETGAFCLDGSLPAYHLDRGFGAGEDNWLLQFEGGGWCNDLKSCLERAKTRRGSTNYMTKYETFNGILSNNATVNPDFYNWNRVKLRYCDGASFTGNRVFNNGTTKLYFKGQNIWEAIIADILPKGLGKARKALLSGCSAGGLATFHHCDNFTKYLPTNASVKCLSDAGFFLDGRDVSLNHTMRYFFKSVVTLQGSVQNLNKNCTSAMSSYPDLCFFPQYVLKYISTPYFILNSAYDVFQFHNILVPPSADPHGHWNHCKKDPAACTPTEINTLQGFRLSMIAASKPIYFYSNRGGIFINSCFAHCQSESQDTWSGADSPRIINTTIAEAVGDWYFCRNKSKAIDWPYPCDTTCRNLIPVLHNLIP

SEQ ID NO: 293 - DNA, 1266 bp, Medicago truncatula
atgtgtgaaacaaacaagagttttgtaagcatgaagctgctatttgtgtttggattcataggctttgtgattgtgaaaggtgtggatgtggaactgaaaggtttagagaatggtaatgtgacagacatgcaatatgtcagaggaagaggtttcaactatagacctttgatggttggtcttactcttattaatggagctgctgctaaaggagctgtctgccttgatggatctttaccggcttaccacttccatcgtggatacggttcaggttcaaacagttggctaatacatttggagggaggaggctggtgtggaactgtgagaaattgtatttacagtaagaaaacgcgacatggttcatcatattttatggaaaaacaaataccatttattggaatattgagcaacaaagctgcggaaaatccagattttttcaattggaatagagtaaaaattcgttattgtgatggcgcatcgtttagtggggacagtcaaaatgaggcagcaaggttgtatttccgagggcagcgcatatggcaagctgcaatggaagatttaatgtcgaaagggatgcgctatgccaaacaggctcttctatctggatgttctgcaggaggtttatcagctatactacattgcgatgaatttcgggaattgtttccaagaacaactagagtaaagtgctttagtgatgccggattattccttgactctgttgatgtatctggccgtcgcagtttaaggaatttgtttggcagtgtagtgactttacagggtgcgcataagagccttccaagaagttgtaccaatcacctcaatccaattttgtgctttttccctcagcatttaattgcaagtgtaaggacgccactatttcttctcaatgcagcttatgatacttggcagattcaagccagtctagctccaccatctgctgactaccattggaattggtatgactgccgaaaaaattatgcacgctgtagttcaccacagatacaatatctacaaggttttcgaaatcagatgcttagagttacaagacgcttctcaaggtcccgccaaaacgggttattcattaattcgtgttttgctcactgccaatctgaaagacaggatacatggcatgcacgcggttctcctcatattggaaataaagggatcgcagattctgtcgggaactggttttttgaccgagttggtgtccaagctattgggtgtccttacccttgtgacaaaacatgccataatttggttttcaactga

SEQ ID NO: 294 - protein, 421 aa, Medicago truncatula
MCETNKSFVSMKLLFVFGFIGFVIVKGVDVELKGLENGNVTDMQYVRGRGFNYRPLMVGLTLINGAAAKGAVCLDGSLPAYHFHRGYGSGSNSWLIHLEGGGWCGTVRNCIYSKKTRHGSSYFMEKQIPFIGILSNKAAENPDFFNWNRVKIRYCDGASFSGDSQNEAARLYFRGQRIWQAAMEDLMSKGMRYAKQALLSGCSAGGLSAILHCDEFRELFPRTTRVKCFSDAGLFLDSVDVSGRRSLRNLFGSVVTLQGAHKSLPRSCTNHLNPILCFFPQHLIASVRTPLFLLNAAYDTWQIQASLAPPSADYHWNWYDCRKNYARCSSPQIQYLQGFRNQMLRVTRRFSRSRQNGLFINSCFAHCQSERQDTWHARGSPHIGNKGIADSVGNWFFDRVGVQAIGCPYPCDKTCHNLVFN

SEQ ID NO: 295 - DNA, 1185 bp, Medicago truncatula
atggagagcacaaaattaggccaatggttaaagttaaaccttctggtgattttactggtattgctgaaggcagaagctgattttgtaccaaccactattgtccaaaatgctgtagcaaaaggagccgtttgtttggatggtagtccaccagcttacaattttgataagggctatggaaaaggaagcaacagttggttggttcatatggagggagggggatggtgccacaatgtcactaattgtctaggtcgtatgacgactcgtttaggttcatctaagcaaatgaataagacacttgcattttcaggaattttaaatgacaagaaacagtttaatccagatttttacaattggaacagaatcaagattagatattgtgatggttcatcttttactggtgatgtggaagcagtcgatccagtaactaagttgcattttagaggagcaagaatttttgaagctgtcatggaggaattactagcaaaaggaatgaaaaaggctcaaaatgctattctctcaggatgttcagctggaggattgacctcattactgcattgtgatcgctttcgagctcttttaccgaaaggatctaacgtgaaatgcatctcagatgctggttactttatcaatgcaaaagatatatctggagcaccgcattttgaagagtacttcaatcaaattgttaccttacatggttctgtaaaaaatttgcctggatcatgcacttcaaaactcaaaccagagctgtgctttttccctcaaaattttgtatcacaaatcactacaccgatcttcgttgtaaattcgccaatcgactcttatcagattaagaacattttggcaccagatgccgatgattggaagaattgcaagctagatataactaaatgcactcctgctcaactaaatcaagtgcaaggatttaggaaagaattcctaagggctttggctcctataggaaactcttcatctgtaggaacgttcatagactcttgctatctccactgccaaaccgaattgcaggaattctggttgtttaatggctctccattgttggccaacacaaccattgcaaaatctgtagcagactggttttatgacagaaggcctttccatcagatagattgtccttacccttgcaatccaacatgtcacacccacgttaatcaagatgcagaactatag

SEQ ID NO: 296 - protein, 394 aa, Medicago truncatula
MESTKLGQWLKLNLLVILLVLLKAEADFVPTTIVQNAVAKGAVCLDGSPPAYNFDKGYGKGSNSWLVHMEGGGWCHNVTNCLGRMTTRLGSSKQMNKTLAFSGILNDKKQFNPDFYNWNRIKIRYCDGSSFTGDVEAVDPVTKLHFRGARIFEAVMEELLAKGMKKAQNAILSGCSAGGLTSLLHCDRFRALLPKGSNVKCISDAGYFINAKDISGAPHFEEYFNQIVTLHGSVKNLPGSCTSKLKPELCFFPQNFVSQITTPIFVVNSPIDSYQIKNILAPDADDWKNCKLDITKCTPAQLNQVQGFRKEFLRALAPIGNSSSVGTFIDSCYLHCQTELQEFWLFNGSPLLANTTIAKSVADWFYDRRPFHQIDCPYPCNPTCHTHVNQDAEL

SEQ ID NO: 297 - DNA, 1254 bp, Medicago truncatula
atgcctttgtccaccaaccttcacctccgcaatgttataattttgttgaaaaaatggagcaaacaagaatacacaatcgctgcattcaccataatcctcttcatcttctctctcactttcctcaaccgatccaatcaatctcactccaacgactcccacatcaatctcattccattcactcctctcgctaacttcaaacaacttggtgcactttgcttggatggcactgctcctggttatcatttccaaaagggttttggatccggatctcgtaattggttgctccaccttgagggaggagggtggtgcaattcaatttcttcttgttcttatagaaaaaccactgctttaggctcatctaactatatggatacacccgttcctttttcagggatactaagctctgttccttctcaaaatcctgatttctttaactggaacaaggtgaagatacgctactgtgatggtgcatcctttgctggtcacccagaaagtgagccgaaaggaagtgggttgttcttcagaggccagatcatatgggaagctattatgaatgaactcttatcaattggcatgtcgaaagcaaaacaggctctgttgtctgggtgttctgctggaggattggcaactcttatacattgtgataacttccgacaactacttccgaaggaggccactgtcaagtgtctcgcggatgcaggcttcttccttgatgagaaggatattgctggaaatagcaccatgaaatctttctatcatgatgttgttcagctccagggtgttgcaaaaagtttgcacaaagagtgcctttgtctctttccatcagaaattctgaaaaacataaagactcctgttttccttgttcacccagcttatgatttttggcagatacacaatattttggtacctgaaggatcagatccccaccgtcgctggaaaagctgcagattaaacattcaaagttgtgatgctaacatgatttctatactcgacagtttccgtagttctttgctgaaggctgtgaacgagttccagcaacgaaaggatattggaatgtttattgattcctgctttatccattgtcaaacttggatgggggagacatggcattcacctcgttctccaaaaataaaccataagacaattgctgaatctgttgccgattggttctttgaccgacaagtggtaaagcttattgactgcccttttccatgtaatcctacttgccataacatggatttcaccagagtatag

SEQ ID NO: 298 - protein, 417 aa, Medicago truncatula
MPLSTNLHLRNVIILLKKWSKQEYTIAAFTIILFIFSLTFLNRSNQSHSNDSHINLIPFTPLANFKQLGALCLDGTAPGYHFQKGFGSGSRNWLLHLEGGGWCNSISSCSYRKTTALGSSNYMDTPVPFSGILSSVPSQNPDFFNWNKVKIRYCDGASFAGHPESEPKGSGLFFRGQIIWEAIMNELLSIGMSKAKQALLSGCSAGGLATLIHCDNFRQLLPKEATVKCLADAGFFLDEKDIAGNSTMKSFYHDVVQLQGVAKSLHKECLCLFPSEILKNIKTPVFLVHPAYDFWQIHNILVPEGSDPHRRWKSCRLNIQSCDANMISILDSFRSSLLKAVNEFQQRKDIGMFIDSCFIHCQTWMGETWHSPRSPKINHKTIAESVADWFFDRQVVKLIDCPFPCNPTCHNMDFTRV

SEQ ID NO: 299 - DNA, 1386 bp, Medicago truncatula
atgagaagaatgaatattattctgataataataacagtaactttttcctcagttagatctcagacacaaaatctatctcctcggtatatcttggagaacgataacgatgtcgtttcagtttcatcctctcccctgctgcctcaacctctcatgatcccactcactcttattcatggagctgtttctaaaggagcagtatgtttggatggaactttacctggttaccacttccatcccggatctggatctggtgcaaatagttggctcattcaattggagggaggaggatggtgtaataccatcagaagttgtgtctttagaaaaactactcgacgcggttcctcaaaatacatggaaaagcaactaccattcactggaatattgagcaataaagctgaacaaaatcctgatttctttaactggaacagagtcaaagtgcggtactgtgatggggcttctttcagtggagacagtcaaaacgaggctgcacagcttcaatttagaggacagaaaatatggctagctgcaatggaagaattaatgtccaggggaatgaagaacgccaaccaggctcttttatctggatgctctgcgggtggtctggcatctatactacattgcgatgagttccaaagcttgtttccaaaatctaccaaagtgaaatgtttgagtgatgcaggattttttcttgatgcaactgatgtatttggggggcacacattgaggaatctgtttggaggtgtagttaatttacaggaagtgcaaaaaaatctaccaaaaagttgtctcaaccacctggacccaacttcgtgcttctttcctcaaaatttgatcgatcatgttcagactccattgtttctgctgaatgcagcttatgatgcatggcagttccaagaaagtctagctcctcattcagcagatcctcatggatcttggaataattgtaaatcaaatcatgcaaattgtaattcatcccaaattcagatcctccaaaacttcagaaatcaaatgctaaatgacatcaaaggattttcaacgacttctcaatctggattattcataaattcttgttttgctcattgccaatcggagagacaagatacatggtttgctgatgactctcccctccttaacaacatgccaattgcggttgccattggaaattggtttttcgatcgtcaagttgtcaaagctattgattgtgcttacccctgtgataatacctgccataatctggtcttcaatgttggtaaatctgccatggtagactctcaatccacaagtgatgatattcctacctccatgcaatattcccgctccacaaggttgacttttagtgctggcttatttgtactaagtgctttattaccaattacatgctcataa

SEQ ID NO: 300 - protein, 461 aa, Medicago truncatula
MRRMNIILIIITVTFSSVRSQTQNLSPRYILENDNDVVSVSSSPLLPQPLMIPLTLIHGAVSKGAVCLDGTLPGYHFHPGSGSGANSWLIQLEGGGWCNTIRSCVFRKTTRRGSSKYMEKQLPFTGILSNKAEQNPDFFNWNRVKVRYCDGASFSGDSQNEAAQLQFRGQKIWLAAMEELMSRGMKNANQALLSGCSAGGLASILHCDEFQSLFPKSTKVKCLSDAGFFLDATDVFGGHTLRNLFGGVVNLQEVQKNLPKSCLNHLDPTSCFFPQNLIDHVQTPLFLLNAAYDAWQFQESLAPHSADPHGSWNNCKSNHANCNSSQIQILQNFRNQMLNDIKGFSTTSQSGLFINSCFAHCQSERQDTWFADDSPLLNNMPIAVAIGNWFFDRQVVKAIDCAYPCDNTCHNLVFNVGKSAMVDSQSTSDDIPTSMQYSRSTRLTFSAGLFVLSALLPITCS

SEQ ID NO: 301 - DNA, 1248 bp, Medicago truncatula
atgagaagaatgaatattattctgataataataacagtaactttttcctcagttagatctcagacacaaaatctatctcctcggtatatcttggagaacgataacgatgtcgtttcagtttcatcctctcccctgctgcctcaacctctcatgatcccactcactcttattcatggagctgtttctaaaggagcagtatgtttggatggaactttacctggttaccacttccatcccggatctggatctggtgcaaatagttggctcattcaattggagggaggaggatggtgtaataccatcagaagttgtgtctttagaaaaactactcgacgcggttcctcaaaatacatggaaaagcaactaccattcactggaatattgagcaataaagctgaacaaaatcctgatttctttaactggaacagagtcaaagtgcggtactgtgatggggcttctttcagtggagacagtcaaaacgaggctgcacagcttcaatttagaggacagaaaatatggctagctgcaatggaagaattaatgtccaggggaatgaagaacgccaaccaggctcttttatctggatgctctgcgggtggtctggcatctatactacattgcgatgagttccaaagcttgtttccaaaatctaccaaagtgaaatgtttgagtgatgcaggattttttcttgatgcaactgatgtatttggggggcacacattgaggaatctgtttggaggtgtagttaatttacaggaagtgcaaaaaaatctaccaaaaagttgtctcaaccacctggacccaacttcgtgcttctttcctcaaaatttgatcgatcatgttcagactccattgtttctgctgaatgcagcttatgatgcatggcagttccaagaaagtctagctcctcattcagcagatcctcatggatcttggaataattgtaaatcaaatcatgcaaattgtaattcatcccaaattcagatcctccaaaacttcagaaatcaaatgctaaatgacatcaaaggattttcaacgacttctcaatctggattattcataaattcttgttttgctcattgccaatcggagagacaagatacatggtttgctgatgactctcccctccttaacaacatgccaattgcggttgccattggaaattggtttttcgatcgtcaagttgtcaaagctattgattgtgcttacccctgtgataatacctgccataatctggtcttcaagtga

SEQ ID NO: 302 - protein, 415 aa, Medicago truncatula
MRRMNIILIIITVTFSSVRSQTQNLSPRYILENDNDVVSVSSSPLLPQPLMIPLTLIHGAVSKGAVCLDGTLPGYHFHPGSGSGANSWLIQLEGGGWCNTIRSCVFRKTTRRGSSKYMEKQLPFTGILSNKAEQNPDFFNWNRVKVRYCDGASFSGDSQNEAAQLQFRGQKIWLAAMEELMSRGMKNANQALLSGCSAGGLASILHCDEFQSLFPKSTKVKCLSDAGFFLDATDVFGGHTLRNLFGGVVNLQEVQKNLPKSCLNHLDPTSCFFPQNLIDHVQTPLFLLNAAYDAWQFQESLAPHSADPHGSWNNCKSNHANCNSSQIQILQNFRNQMLNDIKGFSTTSQSGLFINSCFAHCQSERQDTWFADDSPLLNNMPIAVAIGNWFFDRQVVKAIDCAYPCDNTCHNLVFK

SEQ ID NO: 303 - DNA, 1260 bp, Medicago truncatula
atggctaaacttttctggcttttcattgcaataggacttgttatcatcaacttggtttatggtcaacaacatcacttcttcaatgaaactgaagaactctttctgttagaggctcatgaacatgcagcatcctttcttgaggagggtaatggaaatcctcttctcgtaggactcacccttgttcacaatgcagctgctaaaggagcagtgtgcttggatggaacattacctggttaccatttgcaccgtggatatggatcaggagcagacagttggcttgttaatttagagggaggtggatggtgtaacaatgtcagatcatgtgtttatcgcaagaaaacacggcgtggatcatcattatacatggaaaaggagataccattcacaggaatacttagtaataaacctgaagaaaatccagattttttcaactggaatagagcaaagcttcgttattgtgatggtggctcatttgctggtgatggtgaagatcaggatgcagaactgcaatttagaggacagcgtatttgggcagctgcaatggaagatttgatatcaaagggaatgcattttgctaatcaagctcttctttccggatgttccgctggtggcctagcaactattatacactgcgatgaatttcgaggtctctttccaaggactactaaagtgaagtgtctaagcgatgcagggttgtttcttgattcgattgatatatctggtgagcgcaccctccggaatatgtacaatggtgttgtagggatgcaggaagcacagaagaatctaccgcagatttgtactaatcaccttgatcctacatcgtgtttcttccctcagaatttgattgccagtgttagaacaccactttttcttctcaatactgcttatgattcatggcagatccagtcaagtttagctcctccatcagcagatccccatggctattggcatgaatgcagattaaaccatgctaaatgcacaaggccacaaatcaaatttctgcaagggttcaggactcacatgttgaattctattaaagacttctcaagatcaaacaagaatggattgtttatcaattcatgtttcgctcactgccaaactgagaggcaagatacatggttttcagacaattcgccggttattaggaacaaggtaattgctttagctgttggagactggtattttgatcgagaaggtgttaaggtcattgattgtccttacccttgtgataatacatgtcaccatttggttttcagttga

SEQ ID NO: 304 - protein, 419 aa, Medicago truncatula
MAKLFWLFIAIGLVIINLVYGQQHHFFNETEELFLLEAHEHAASFLEEGNGNPLLVGLTLVHNAAAKGAVCLDGTLPGYHLHRGYGSGADSWLVNLEGGGWCNNVRSCVYRKKTRRGSSLYMEKEIPFTGILSNKPEENPDFFNWNRAKLRYCDGGSFAGDGEDQDAELQFRGQRIWAAAMEDLISKGMHFANQALLSGCSAGGLATIIHCDEFRGLFPRTTKVKCLSDAGLFLDSIDISGERTLRNMYNGVVGMQEAQKNLPQICTNHLDPTSCFFPQNLIASVRTPLFLLNTAYDSWQIQSSLAPPSADPHGYWHECRLNHAKCTRPQIKFLQGFRTHMLNSIKDFSRSNKNGLFINSCFAHCQTERQDTWFSDNSPVIRNKVIALAVGDWYFDREGVKVIDCPYPCDNTCHHLVFS

SEQ ID NO: 305 - DNA, 1191 bp, Medicago truncatula
atggaaataatgaagtttataagaatggaccaattattcagtcttgtaatatgtacacttctattactaaaagcagcagaaggggttactgtgccaatcacttttgttcaaagtgcagtggcaaaaggagctgtttgtttggatggtagtccaccagcttaccactttgataagggatttgaagctggaattgacaactggattgttcactttgagggaggaggatggtgcaacaatgcaactacttgccttgaccggatcgacactcgtttaggatcatcgaagaaaatggataagacactttccttttctggattttttagtagcggcaaaaagtttaatccagatttctataattggaacagaatcaaggttaggtattgtgatggttcttcatttaccggcgatgttgaagctgtcgatccaaaaaccaatttgcactacagaggaggaaggatttttgttgctgtcattgaggatttactagcaaaaggaatgaaaaatgctaaaaatgcaattctctctggatgttcagctggaggattgacttctattttacaatgtgatcgcttcagaactttactacctgcagcagctaaagtgaaatgtgtctcagatgctggttattttatcaatgtaaaggctgtctccggagcatcacacatcgaacaattctacagtcaagttgttcaaacacatggctcagcaaagaatttgccttcatcttgtacttcaagactctcaccagggctgtgttttttcccccaaaacgtggccgcacaaatcaaaacaccgatcttctttgtaaatgcagcctatgattcatggcagattaagaacattttggcaccaggtgttgctgatcctcatggcacttggagaaactgcaagcttgatataaagagctgttctgctaatcaattaagtacaatgcaaggtttcaggacagaattcttaaaggcaattagtgtggttagtaattctccatctaaaggaatgtttatagatggctgctattcccactgccaaactggaatgcaggaaacatggatgagaaccgactctccggtgctggccaaaacaacaatagcaaaggctgtaggagattggtattatgatagaagcacttttcagcagatagattgtccttatccttgcaaccctacttgtcataaccgtgtttttgaatga

SEQ ID NO: 306 - protein, 396 aa, Medicago truncatula
MEIMKFIRMDQLFSLVICTLLLLKAAEGVTVPITFVQSAVAKGAVCLDGSPPAYHFDKGFEAGIDNWIVHFEGGGWCNNATTCLDRIDTRLGSSKKMDKTLSFSGFFSSGKKFNPDFYNWNRIKVRYCDGSSFTGDVEAVDPKTNLHYRGGRIFVAVIEDLLAKGMKNAKNAILSGCSAGGLTSILQCDRFRTLLPAAAKVKCVSDAGYFINVKAVSGASHIEQFYSQVVQTHGSAKNLPSSCTSRLSPGLCFFPQNVAAQIKTPIFFVNAAYDSWQIKNILAPGVADPHGTWRNCKLDIKSCSANQLSTMQGFRTEFLKAISVVSNSPSKGMFIDGCYSHCQTGMQETWMRTDSPVLAKTTIAKAVGDWYYDRSTFQQIDCPYPCNPTCHNRVFE

SEQ ID NO: 307 - DNA, 1221 bp, Medicago truncatula
atggagagttcaagaatcataaaatggttaagtactctactatgtgccctgctattcctaaagacacaaggacagtatgttccattgactaggctcgaaagtgcggtatcgaaaggagctgtgtgtttggatggaagccccccagcttaccattttgatcaaggacatgatgaaggagctaacaattggattgttcacattgagggaggtggatggtgccataatgtaacgtattgcctttatcggagggacagtcgattaggttcgtcgcatgaaatggaagagcaaacttacttttctggatatttaagtgacaaccaacaatataatccagatttctacaattggaatagagtcaaggttaggtattgtgacggatcatcatttaccggcgatgttgaagaagttgatccaacgacgaagttatactacagaggtgcaaggattttttctgctgtaatggaagagttactagcaaaaggaatggatcatgctgaaaatgctattctttctggatgttctgctggaggattaactactatattacactgtgacggatttcgagcactatttcctaatgaaactagagtgaaatgtgtctcagatgctggttattttgttaatgtaaatgatatctcaggagatcattacattgaagattactacagtcaagttgttgcaacacatggctcagaaaagagtttgccttcatcctgcacttcaatgctcagtccaggactgtgctttttcccgcaatatatggcatcaagtatacaaacaccaatcttcattgtaaacgcagcatatgactcatggcagatcaaaaacattttggcacctggtgatgctgatcccgacggccaatggcgtagctgcaagaccaatctaaacaactgctcacctgaacagctaaatataatgcaagactatagaacacaattcttagaggcattgagtcctataagcaattctccatctaatggaatgttcatagactcttgctatgtccactgccaaacagaaccgcaggaaacatggtttaaaagcgactctccaatggttggcaataaaacagttgcaaaggcagtaggagactggttttatgaaagaagtccttcacgtgagatagactgtacttacccttgcaaccctacttgtcagaaccgtgtttgggagtcagcaactgcatcatacccagcaatgtacactagagtctactaa

SEQ ID NO: 308 - protein, 406 aa, Medicago truncatula
MESSRIIKWLSTLLCALLFLKTQGQYVPLTRLESAVSKGAVCLDGSPPAYHFDQGHDEGANNWIVHIEGGGWCHNVTYCLYRRDSRLGSSHEMEEQTYFSGYLSDNQQYNPDFYNWNRVKVRYCDGSSFTGDVEEVDPTTKLYYRGARIFSAVMEELLAKGMDHAENAILSGCSAGGLTTILHCDGFRALFPNETRVKCVSDAGYFVNVNDISGDHYIEDYYSQVVATHGSEKSLPSSCTSMLSPGLCFFPQYMASSIQTPIFIVNAAYDSWQIKNILAPGDADPDGQWRSCKTNLNNCSPEQLNIMQDYRTQFLEALSPISNSPSNGMFIDSCYVHCQTEPQETWFKSDSPMVGNKTVAKAVGDWFYERSPSREIDCTYPCNPTCQNRVWESATASYPAMYTRVY

SEQ ID NO: 309 - DNA, 1188 bp, Lactuca sativa
atgatgagcgaaagaggagatcgatggctatgtatattcttggtttgcacattaagtttgttatgcacagaagcttatgatgttggactcacttttcttaatagtgctgttgctaaaggagctgtttgtttggatggtagtgcacccgcgtatcatatcgataaaggattcggtgcaggaatcgacaattggttggttttctttgagggaggaggatggtgcaacaatgccacaaattgccttacccgtagagatactcgattaggttcctcaaagaaaatgttgacaacagagacgttttcgggcatgtttcacaacaaggcaaaatataaccctgacttttacgattggaataggatcaaggtccgttattgtgacggagcttcctttaccggtgatgtggaagcagtcgatcccaataccaagctttactatagaggagccaggatttttcgtgcagttgttgacgatttgttagcaaaagggatgaagaacgctaaaaatgcgattctagcggggtgttcagccggcggattgacttcgatcttgcagtgcgataatttccgatcacaattaccggcgacgactaaagtgaaatgcctttccgatgccggatttttcatcaatgcgaagacgattatagggcaaagtcacattgaaggcttctacgctgacgtcgttagaacacatggatctgctaaagttttgtctccagcttgccttgcgaaaatgagtcctggtttgtgttttttcccacaaaacatggtgcaattcatcaaaacacccattttcttgattaatgcagcatatgattcatggcaggtgaagaatatattagctcccggagtggctgatcgcaaaggcacatggcgcgaatgcaaacttgacataacaaaatgttcatctgctcaacttaacgtccttcaaggatacaggctggaattcttaaaagctctaaatggatttggcaatggcaactctccttctagaggaatgttcatcaactcttgctattctcattgccaaacaggaattcaagaaacatggttgagaaatgactcaccgttgttgggtaacacgacgattgcaaaagctgtcggagattggtactatgagaggaacacgtttcaaaagatagattgtgcatacccatgtgataaaacttgccacaatcgtgtgttcgagtag

SEQ ID NO: 310 - protein, 395 aa, Lactuca sativa
MMSERGDRWLCIFLVCTLSLLCTEAYDVGLTFLNSAVAKGAVCLDGSAPAYHIDKGFGAGIDNWLVFFEGGGWCNNATNCLTRRDTRLGSSKKMLTTETFSGMFHNKAKYNPDFYDWNRIKVRYCDGASFTGDVEAVDPNTKLYYRGARIFRAVVDDLLAKGMKNAKNAILAGCSAGGLTSILQCDNFRSQLPATTKVKCLSDAGFFINAKTIIGQSHIEGFYADVVRTHGSAKVLSPACLAKMSPGLCFFPQNMVQFIKTPIFLINAAYDSWQVKNILAPGVADRKGTWRECKLDITKCSSAQLNVLQGYRLEFLKALNGFGNGNSPSRGMFINSCYSHCQTGIQETWLRNDSPLLGNTTIAKAVGDWYYERNTFQKIDCAYPCDKTCHNRVFE

SEQ ID NO: 311 - DNA, 1230 bp, Oryza sativa subsp. indica
atggcgaccagcagcaagctccggtcgccggtgctcccgcgccgtcgacttgcggagcccttccttctgctgctcctgctcctgctcctggccgccgtagcccgcccaacggcggcggcggacgtcgtcgagctgaccctcctcgccggcgctcaggagaagggcgcagtgtgcttggatgggagcccgccggggtaccacctgcagagaggcttcggctccggtgagcacagctggctcgtctttcttgagggaggagcctggtgcaacagcatcgaaagttgttccaggcgcaaaatgggcgtgtatggttcatccaaattcatgaaagcagcagagttcaatggaatactcagcaatgaccaacaactgaattctgatttttataactggaacaaagttgccataaggtattgcgatggggcatcgttttctggtgatgcggaggcccaagataaggatgggagcacacttcatttcaggggattgcgcatctgggaagcagttgttgatgagctcatgggaaaaggactcgcaactgctaaacaggccatactttcaggatgctctgctggtggtctggctgcactactgcactgcaatgattttcacgcacgatttccaaaggaggtttcagctaaatgccttcctgatgctggatttttccttgatgttgaggatttatctggcgagaggcacatgtggtccgtattcaatggaactgttcatcttcagaatgttagagaagttttgtcaaaagattgtcttacaaagaaggatccaacagagtgcttctttcctgctgagcttgttaagagcatcaccgctcccacgcttattctgaactctgcttatgattcttggcagataaggaatgcccttgctccagatggatcctttcctggacagtcatggtccagttgcaaaactgacattcggaattgcagttccacacaaatccaagtattcaatggattcaggaacaaatttgtcgatgatgtagagattgtcaaagacaaaaaggactggggactgttcattgattcatgcttcacccactgtcaaacgccattcaacatctcatggagctcacaggcctccccagtgctcggtagcaagactgttgccgaggctgttggggattggtatttcgagagaagctatgaagtgaaagagatcgactgcgagtatccttgtaaccccacatgtagcagccagctgcctacatga

SEQ ID NO: 312 - protein, 409 aa, Oryza sativa subsp. indica
MATSSKLRSPVLPRRRLAEPFLLLLLLLLLAAVARPTAAADVVELTLLAGAQEKGAVCLDGSPPGYHLQRGFGSGEHSWLVFLEGGAWCNSIESCSRRKMGVYGSSKFMKAAEFNGILSNDQQLNSDFYNWNKVAIRYCDGASFSGDAEAQDKDGSTLHFRGLRIWEAVVDELMGKGLATAKQAILSGCSAGGLAALLHCNDFHARFPKEVSAKCLPDAGFFLDVEDLSGERHMWSVFNGTVHLQNVREVLSKDCLTKKDPTECFFPAELVKSITAPTLILNSAYDSWQIRNALAPDGSFPGQSWSSCKTDIRNCSSTQIQVFNGFRNKFVDDVEIVKDKKDWGLFIDSCFTHCQTPFNISWSSQASPVLGSKTVAEAVGDWYFERSYEVKEIDCEYPCNPTCSSQLPT

SEQ ID NO: 313 - DNA, 1128 bp, Vitis vinifera
atgagagtggcggcgtacgttagcgcggtcatgctaacgtgcrcgtggtgcgtattgtcggagccgaggctggaggtgccgatgactctggttcggaatgcttctcatcagggagctttktgcttagacgggagcttgccggcgtatcatctgcataaaggattcggagctggagctaccaactggcttttgcagtttgagggaggtgggtggtgcaatgatttagaatcatgcttcgagagagccggtactcgtcgtggatcaactcgttacatgtccaagtttgaggtcttttctggaattttaagcaataatgcatctctaaatccagatttttacaattggaaccgggtgaagctaagatattgtgatggagcctcatttgctggggatgccaagtttgacaatgggacctcaatactctactttagagggcagaagatttggcgagcaataattaatgatcttctccctaaaggattaagcaaagcaaagaaggctttactttcaggttgctctgctggaggtctagcatcttttttgcattgtgacaactttaccagctttctaccacaaaatgccagtgtaaaatgcttgagtgatgctggattttttcttgatgaaaaagacataagcttgaaccactctatgagggccttctatgaagaactcatttccctgcagtgcctcttcccacagtatgctttggaattcattaagacacccttttttatcttaaactcagcatatgatgtgtaccaatttcatcatatattggtgccacctactgctgatttgcatggacgttggaatcgttgcaagctagatcctgcggcatgcaatccaaaccagctaagtattttgcaaggttttaggaaagatatgcttacagctttgaaccaattctatacttattcaagaagaggagggatgtttataaattcatgctttgctcattgccaaagtgagtcacaagacacatggctggcaattgactccccaagggtgaacaataagactatcgcagaagcaattggtgaytggtactttagcagaaggataactaaagagattgactgtgcatatccttgtgacaccacttgtcataatcttataccattgccttag

SEQ ID NO: 314 - protein, 375 aa, Vitis vinifera
  misc_feature (15)..(15): Xaa can be any naturally occurring amino acid
  misc_feature (40)..(40): Xaa can be any naturally occurring amino acid
MRVAAYVSAVMLTCXWCVLSEPRLEVPMTLVRNASHQGAXCLDGSLPAYHLHKGFGAGATNWLLQFEGGGWCNDLESCFERAGTRRGSTRYMSKFEVFSGILSNNASLNPDFYNWNRVKLRYCDGASFAGDAKFDNGTSILYFRGQKIWRAIINDLLPKGLSKAKKALLSGCSAGGLASFLHCDNFTSFLPQNASVKCLSDAGFFLDEKDISLNHSMRAFYEELISLQCLFPQYALEFIKTPFFILNSAYDVYQFHHILVPPTADLHGRWNRCKLDPAACNPNQLSILQGFRKDMLTALNQFYTYSRRGGMFINSCFAHCQSESQDTWLAIDSPRVNNKTIAEAIGDWYFSRRITKEIDCAYPCDTTCHNLIPLP

SEQ ID NO: 315 - DNA, 1272 bp, Vitis vinifera
atggtgaaggtagtgggtgtggtcgtggccattgttggacttgtttttagcaaatgggtttatggttttgagtttgaagaaaatgggagttgggtacatggtcttgatgatttgaatgtcacagagctctcattctcagactcttatggagtctctgctgctagcaggcctatgatggtaggcttaacccttattcacgctgctgctgcgaaaggggcagtttgtttagatggaacattaccggggtatcatttgcatcgtggatatgggtcaggggcaaacagttggctcattcaattggaggggggaggatggtgtaatagcattagaacttgtgtttaccgcaagaaaactaggagaggatcatcaatatatatggaaaagcagatcccatttaccggaattctgagcaataatcctgaagaaaatcctgattttttcaactggaatagagtaaagcttcgttattgtgatggtgcctcttttactggtgacagccaaaatcaggctgcacaactgaatttcagaggacagcgtatctggtcagctgctatagaagatttaatgtccaagggaatgcgctatgccaaccaggctcttctttctgggtgctctgctggaggtctggcagctattttacactgtgatgagtttcgaggcttttttccaagaaatactaaagtgaagtgcctgagtgatgctggattattccttgattcgattgatgtatccggtgggcgcacccttaggaatctcttcagtggtgtagttaacttgcagggggtgcaaaggaacctgccatctttttgtttgaatcgtcttgatccaacctcgtgcttcttcccacagaacgtgatatccaatatcaaaaccccgctatttcttctcaatgcagcctatgattcatggcaggtccaggccagtttagctccaccatcagctgatccccatggctattggaatgaatgcaaaaagaaccatgcccagtgttctccatcacaaattcaattcctgcaaggattcaggaatcaaatgctgaatgcaataaaaggcttctcaatgtctaaacaaaacgggttattcataaattcatgttttgctcactgccagacagagaggcaggatacgtggtttgctgataattctcccattattaaaaacaaggggattgctttagctgttggagactggtacttcgaccgatctggcattaaagccatcgactgcccctacccttgtgacaagacctgccacaatctagtattccgatga

SEQ ID NO: 316 - protein, 423 aa, Vitis vinifera
MVKVVGVVVAIVGLVFSKWVYGFEFEENGSWVHGLDDLNVTELSFSDSYGVSAASRPMMVGLTLIHAAAAKGAVCLDGTLPGYHLHRGYGSGANSWLIQLEGGGWCNSIRTCVYRKKTRRGSSIYMEKQIPFTGILSNNPEENPDFFNWNRVKLRYCDGASFTGDSQNQAAQLNFRGQRIWSAAIEDLMSKGMRYANQALLSGCSAGGLAAILHCDEFRGFFPRNTKVKCLSDAGLFLDSIDVSGGRTLRNLFSGVVNLQGVQRNLPSFCLNRLDPTSCFFPQNVISNIKTPLFLLNAAYDSWQVQASLAPPSADPHGYWNECKKNHAQCSPSQIQFLQGFRNQMLNAIKGFSMSKQNGLFINSCFAHCQTERQDTWFADNSPIIKNKGIALAVGDWYFDRSGIKAIDCPYPCDKTCHNLVFR

SEQ ID NO: 317 - DNA, 1200 bp, Picea sitchensis
atggtggacaaaagaatgtcaggtttcaccgagcgttggtttgctatggtagtactggttctgatggttgtgtcagcgaatgcatttttggtggacctgactttggtggaggatgcggtggccaaaggagctgtttgtttagatggaagcccaccaggctaccatttaagcaggggatttggatctggagtaaataactggcttgttcactttgaggggggatcatggtgtaacaatgttacaacatgttccgcgcgtactaaaactcgcttgggttcctctaaatacatgattaagcaagtagatttctcgggccttttaggtaacaacaaagcaagaaatccagatttctataattggaaccgaataaaggttcgatactgtgatggggcatcatttactggagatgtggaggcagtaaatccggtcgataaactctattttagagggcaaagggtgtttaaagctgtcattggcgatctcatggcaaagggaatgattaatgctcagcaggcagtgatttctggttgctcagctgggggtttaacttcaattcttcactgtgataattttcgggcacttatgccgaagactaccaaggtcaagtgtttagcagatgctggatttttcattgacgtgaaggacgtttccggagcataccacataaggtctttctttaatgaagtggcaacattgcagcaatcagtcaagaatttaccattggcttgtaccgaaaaactaggtacacagtgcttctttccacagtatctgttgccctacatacagacaccactatttttattgaatgcgggatatgattcgtggcagattaagaacattgtggcaccaggtgtagcagaccctcatggtctttggcacaattgcaagctagatataaagaaatgcagtccaaaccagttggaaacaatgcaaggtttcaggcttgaaatgcttaatgcattgaaaatatttcaaaactctgcatcaggaggcatgtttatcaactcatgctatgcacattgtcaatctgaaatgcaggagacttggcttgcaaatgactccccaaaattaaatggattgagcattgcagaggcagtacaaaattggtactttgggcagggtattgttaaggaaaccgactgtccatacccatgtgattccacttgtcacaaccgtgttttcacaccgaaggaatattga

SEQ ID NO: 318 - protein, 399 aa, Picea sitchensis
MVDKRMSGFTERWFAMVVLVLMVVSANAFLVDLTLVEDAVAKGAVCLDGSPPGYHLSRGFGSGVNNWLVHFEGGSWCNNVTTCSARTKTRLGSSKYMIKQVDFSGLLGNNKARNPDFYNWNRIKVRYCDGASFTGDVEAVNPVDKLYFRGQRVFKAVIGDLMAKGMINAQQAVISGCSAGGLTSILHCDNFRALMPKTTKVKCLADAGFFIDVKDVSGAYHIRSFFNEVATLQQSVKNLPLACTEKLGTQCFFPQYLLPYIQTPLFLLNAGYDSWQIKNIVAPGVADPHGLWHNCKLDIKKCSPNQLETMQGFRLEMLNALKIFQNSASGGMFINSCYAHCQSEMQETWLANDSPKLNGLSIAEAVQNWYFGQGIVKETDCPYPCDSTCHNRVFTPKEY

SEQ ID NO: 319 - DNA, 1200 bp, Picea sitchensis
atggtggacaaaagaatgccaggtttcaccgagcgttggtttgctatggtagtactggttctgatggttgtgtcagcgaatgcatttttggtggacctgactttggtggaggatgcggtggccaaaggagctgtttgtttagatggaagcccaccaggctaccatttaagcaggggatttggatctggagtaaataactggcttgttcactttgaggggggatcatggtgtaacaatgttacaacatgttctgcgcgtactaaaactcgcttgggttcctctaaatacatgattaagcaagtagatttctcgggcctcttaggtaacaacaaagcaagaaatccagatttctataattggaaccgaataaaggttcgatactgtgatggggcatcatttactggagatgtggaggcagtaaatccggtcgataaactctattttagagggcaaagggtgtttaaagctgtcattggcgatctcatggcaaagggaatgattaatgctcagcaggcagtgatttctggttgctcagctgggggtttaacttcaattcttcactgtgataattttcgggcacttatgccgaagactaccaaggtcaagtgtttagcagatgctggatttttcattgacgtgaaggacgtttccggagcataccacataaggtctttctttaatgaagtggcaacattgcagcaatcagtcaagaatttaccattggcttgtaccgaaaaactaggtacacagtgcttctttccacagtatctgttgccctacatacagacaccactatttttattgaatgcgggatatgattcgtggcagattaagaacattgtggcaccaggtgtagcagaccctcatggtctttggcacaattgcaagctagatataaagaaatgcagtccaaaccagttggaaacaatgcaaggtttcaggcttgaaatgcttaatgcattgaaaatatttcagaactctgcatcaggaggcatgtttatcaactcatgctatgcacattgtcaatctgaaatgcaggagacttggcttgcaaatgactccccaaaattaaatggattgagcattgcagaggcagtacaaaattggtactttgggcagggtattgttaaggaaaccgactgtccatacccatgtgattccacttgtcacaaccgtgttttcacaccgaaggaatattga

SEQ ID NO: 320 - protein, 399 aa, Picea sitchensis
MVDKRMPGFTERWFAMVVLVLMVVSANAFLVDLTLVEDAVAKGAVCLDGSPPGYHLSRGFGSGVNNWLVHFEGGSWCNNVTTCSARTKTRLGSSKYMIKQVDFSGLLGNNKARNPDFYNWNRIKVRYCDGASFTGDVEAVNPVDKLYFRGQRVFKAVIGDLMAKGMINAQQAVISGCSAGGLTSILHCDNFRALMPKTTKVKCLADAGFFIDVKDVSGAYHIRSFFNEVATLQQSVKNLPLACTEKLGTQCFFPQYLLPYIQTPLFLLNAGYDSWQIKNIVAPGVADPHGLWHNCKLDIKKCSPNQLETMQGFRLEMLNALKIFQNSASGGMFINSCYAHCQSEMQETWLANDSPKLNGLSIAEAVQNWYFGQGIVKETDCPYPCDSTCHNRVFTPKEY

SEQ ID NO: 321 - DNA, 1266 bp, Picea sitchensis
atggcttcgacgaggagatctcattccgtaagattattgtataattttgcatatattgtgatcaatattgtctgtctttatacaacagtgctggatgcagcccatgtgggaatgattaagaagcccaaagggtctaaggcttctaaagctaatgatgatcttctgagagtgggtttgacgcttgtggagagagcagcaaatacaggagctgtttgcctggatggaaccttgccggcataccgttttgatagaggatgtggttcaggagcaaacaattggcttcttcagtttgagggtggaggatggtgtaatgacacagagtcctgcattctgcgaaagacaacacacaggggttcatctgcctacatggataaggtggctgtattttcaggcattttgagcgacaagccttcggaaaatccagacttttataattggaatagggtgaaacttatgtattgtgatggagcttcgtttgctggggatgtggaagaaaaggtatcagatctttattttagagggcaaaggatttggcatgctatgattgatgatcttttggcaaagggaatggacaaagcagaaaaggctcttctttctggttgctcagctggtggtttagcaacatatttgcattgtgacaattttcgtgagcttttaccgagctctgccacagtgaaatgtcacgctgatgctggattttttcttgatgcgaaagatatagctggagtgtatcatataagatccttctacaaaagtactgttactttgcagggagtagtgaagaacttgccaaaggcttgtgtatcctcgcagtcagatccaacacagtgcttctttccacagtatgtattgccatatattcagacacccatatttgtcttgaatgcggcatatgatacttggcaggttcataatattttggctccggggtcagaagatcctcatggtcattggcattattgcaagcaaaatccagtaaattgcacatcaagtcaactggagatattgcaaggttataggatggagatgcttaatgcgttggaaacttttaaaccctctgaaacaggaggcatgtttattaattcatgcttttgccattgccaatcagagaatcaagacacatggtttcaatcaaactctccgatgatgaataacaagaccattgcacaggctgtgggagattggtactttgagcgatgtacagtgaaggaagttgattgtccttacccttgtgaccaaacttgccacaaccttgtttttccatga

SEQ ID NO: 322 - protein, 421 aa, Picea sitchensis
MASTRRSHSVRLLYNFAYIVINIVCLYTTVLDAAHVGMIKKPKGSKASKANDDLLRVGLTLVERAANTGAVCLDGTLPAYRFDRGCGSGANNWLLQFEGGGWCNDTESCILRKTTHRGSSAYMDKVAVFSGILSDKPSENPDFYNWNRVKLMYCDGASFAGDVEEKVSDLYFRGQRIWHAMIDDLLAKGMDKAEKALLSGCSAGGLATYLHCDNFRELLPSSATVKCHADAGFFLDAKDIAGVYHIRSFYKSTVTLQGVVKNLPKACVSSQSDPTQCFFPQYVLPYIQTPIFVLNAAYDTWQVHNILAPGSEDPHGHWHYCKQNPVNCTSSQLEILQGYRMEMLNALETFKPSETGGMFINSCFCHCQSENQDTWFQSNSPMMNNKTIAQAVGDWYFERCTVKEVDCPYPCDQTCHNLVFP

SEQ ID NO: 323 - DNA, 1185 bp, Populus trichocarpa
atggatggttcaagtttaggcaagtggctgtgtcttattgtttacatactgacattgctcaagacagaaggagctagcattcccatgactattgtccaggctgctgttgctagaggagctgtttgcttagatgggagtccaccaggataccactttgagaaaggatctggttctgggattaacaattggttggttcacatggagggaggaggatggtgtgagagtgttgagtcttgtgtttctcgtagggacacttacaagggttcatcattgaaaatggagaagacaatggggttctctggcatactaggcagcaagcaagcagctaatcctgatttttataactggaatagaatcaagatcagatactgtgatggttcatcatttactggtgatgtggaagctgttgatccgaaaactaagctttacttcaggggagaaaggatttggcaggctgtcattgatgatctattggcgaaaggaatgagaaatgctcgaaatgctattctttctggatgctctgctggtggattggctgctattttgcattgtgataaattccagtctctcctgcctgcaagtgctagggtaaaatgtgtttctgatgctggttattttatccatggaacggacatctctggagggtctcgaattgaatccttcttcggtcaagttgttaaaacccatggatcagcaaagcatttgcctgcatcatgcacttcaaaaacgagaccagaattgtgtttcttcccacaatatgtggcacaggccatgcgaacgccactttttataatcaactcagcctatgattcctggcagataaagaacatccttgcaccaaccgctgttgattccaaaaaagaatggaagaactgcaagcttgacttgaaaaagtgctcggctactcaactccaaactgtgcagaattataggacacaattcctaaaagcagtgaatattggactcggcagctcttcatcgagaggattgtggataaattcttgctacgctcactgccaatctgggtcggtatctacgtggttagccgacaaatcccccgtggtgggcaatgtgaaaatcggaaaggcagttggagattggttctatgaccgaagtgccttcgaaaaaatcgattgcgcttacccttgcaaccctacttgcgtcagtattgattccgaatcatga

SEQ ID NO: 324 - protein, 394 aa, Populus trichocarpa
MDGSSLGKWLCLIVYILTLLKTEGASIPMTIVQAAVARGAVCLDGSPPGYHFEKGSGSGINNWLVHMEGGGWCESVESCVSRRDTYKGSSLKMEKTMGFSGILGSKQAANPDFYNWNRIKIRYCDGSSFTGDVEAVDPKTKLYFRGERIWQAVIDDLLAKGMRNARNAILSGCSAGGLAAILHCDKFQSLLPASARVKCVSDAGYFIHGTDISGGSRIESFFGQVVKTHGSAKHLPASCTSKTRPELCFFPQYVAQAMRTPLFIINSAYDSWQIKNILAPTAVDSKKEWKNCKLDLKKCSATQLQTVQNYRTQFLKAVNIGLGSSSSRGLWINSCYAHCQSGSVSTWLADKSPVVGNVKIGKAVGDWFYDRSAFEKIDCAYPCNPTCVSIDSES

SEQ ID NO: 325 - DNA, 1200 bp, Litchi chinensis
atggttgatgcaaggtggagcccgtggttaagtcttctagtatgtggactgatattgctgaaaacagaaggcttcgatgtaggaatcacttatgttgagaatgctgtagcaaaaggagctgtttgtttggacggtagcccaccggcttatcacttggataaggggtttggtgctgggatcaacaattggttggttcacattgagggaggaggatggtgcaacaatgtcacaacttgtctttctcgtaaaaatacccgcttaggttcctctaagaaaatggtcaaggtagttgctttctctgggatgttgagcaataagcagaaatttaacccagacttctacaattggaatcgaatcaaggttagatactgtgatggggcatcatttactggtgatgtggaagctgtaaatcctgcaactaaccttcacttcagaggagcaagggtttttcttgccatcattgaggatctattggctaaagggatgaaaaatgctaaaaatgctgttctttctggttgctcggctggcggattgacttcaattttacattgtgataaatttcaaactctcttgcccacaagtactaaagtaaaatgctttgcagatgctggttattttatcaatacaaaggatgtttctggagcacaacacattgaagcattctataatgaagtagttgcaacacatggctcagctaagaacttgcctgcatcttgcacttcgagattgaaaccaggattgtgttttttcccgcaatacatggcacgacaaatacagacaccgctatttatcataaatgcagcctatgattcatggcagataaaaaacattttggcaccgggtgttgctgatccacatggtacttggcacagttgcaagcttgacataaacaactgctcgcctaatcagctacaaaccatgcaaagtttcaggttgcaattcttagatgcattgagtggactaggcaactctacatcaaagggattgttcatagattcttgctatgctcactgccaaaccgagatgcaggagacatggttaagagatgactctcccgtgctgggtaaaacgacaatagcaaaagctgtgggagactggtattatgacaggagtcccttccaaaagatagattgcccatacccttgcaaccccacctgccacaaccgtgttttcgatcctgacgatcaccccggagtatag

SEQ ID NO: 326 - protein, 399 aa, Litchi chinensis
MVDARWSPWLSLLVCGLILLKTEGFDVGITYVENAVAKGAVCLDGSPPAYHLDKGFGAGINNWLVHIEGGGWCNNVTTCLSRKNTRLGSSKKMVKVVAFSGMLSNKQKFNPDFYNWNRIKVRYCDGASFTGDVEAVNPATNLHFRGARVFLAIIEDLLAKGMKNAKNAVLSGCSAGGLTSILHCDKFQTLLPTSTKVKCFADAGYFINTKDVSGAQHIEAFYNEVVATHGSAKNLPASCTSRLKPGLCFFPQYMARQIQTPLFIINAAYDSWQIKNILAPGVADPHGTWHSCKLDINNCSPNQLQTMQSFRLQFLDALSGLGNSTSKGLFIDSCYAHCQTEMQETWLRDDSPVLGKTTIAKAVGDWYYDRSPFQKIDCPYPCNPTCHNRVFDPDDHPGV

SEQ ID NO: 327 - DNA, 1308 bp, Sorghum bicolor
atgccgccgccgtcgccgtcggccccggcctcgcaccacgtgcgcctgtggtggaggcgccgcggccgggccggcgcagtcggggccaccttcaccgtcgcgctcctcgcggccgcgctgctcctcgcgctctccagctacgcctccgtagtattccccgcgtccggtggccgccgcggccccgccctcgtcgggctcaccctcgtccgccgcgccagagagaagggcgcgctgtgcttggatgggagcgcgcccgggtaccatctgcagagagggtctgggagtggatcgcagagctggctaatccacttggagggtggaggctggtgccgtaatctcaagtcatgtgcgtcacgtcagagatcaatgttgggctcatcccggtacatggaaggccaggttgagtttacagggatcttgagcgatgacagatctcagaatcccgacttttacaattggaataaagtgaagataaggtattgtgatggggcatcattctctgggaatgtaaaagatgaattgcagaatggcacaagattcttcttcagaggccagcgtatctgggaagcagttatgaacgaacttgtagttaaggggctccgaaatgctaaacaggctttcctaacaggatgctctgctggtgggctagccacttacattcactgtgattcttttcgtgcgctgctaccaaaggattctagggttaagtgtcttgcggatggcggatttttccttgatgtagaagacatttctgggagaaggacaatgcagtctttctacagtgatgttgtgcgccttcagggtctaagggaaaggttttcacattgtaactcaaacatggaggcgggccagtgtttatttccacgtgaagttgtgaaacacattgtcaacccagtctttgttcttaatccagcatatgatgcttggcaggtggtacaacatgcgttggctccagaagcatctgaccctcaacattcatggctggactgcagattggatattagcaagtgcggctctgaacaacttgaaattctccaaggtttcaggaaagaactgcatgacgctataagtgaagtgaagcagaaaagggactggggattctatatcaactcgtgttttgttcactgccagtcgctaaactcgttgacttggcactctccaacttctcccagagtcaacaataagagcattgcagaagcagttggagactggttctttgacagaagagaggtgaaggagatagattgcgaatacccctgcaacccgacgtgccacaacttggtgttcgcaaaggctttcaagatttga

SEQ ID NO: 328 - protein, 435 aa, Sorghum bicolor
MPPPSPSAPASHHVRLWWRRRGRAGAVGATFTVALLAAALLLALSSYASVVFPASGGRRGPALVGLTLVRRAREKGALCLDGSAPGYHLQRGSGSGSQSWLIHLEGGGWCRNLKSCASRQRSMLGSSRYMEGQVEFTGILSDDRSQNPDFYNWNKVKIRYCDGASFSGNVKDELQNGTRFFFRGQRIWEAVMNELVVKGLRNAKQAFLTGCSAGGLATYIHCDSFRALLPKDSRVKCLADGGFFLDVEDISGRRTMQSFYSDVVRLQGLRERFSHCNSNMEAGQCLFPREVVKHIVNPVFVLNPAYDAWQVVQHALAPEASDPQHSWLDCRLDISKCGSEQLEILQGFRKELHDAISEVKQKRDWGFYINSCFVHCQSLNSLTWHSPTSPRVNNKSIAEAVGDWFFDRREVKEIDCEYPCNPTCHNLVFAKAFKI

SEQ ID NO: 329 - DNA, 1194 bp, Zea mays
atggcggcgtccggggcatggctggcccgtgcgacggcgacggcggtgctgggtttcgtcctggcggtggcgtcagctgaggcggcatcgggggacgtggagatggtgttcctcaaggccgcggtggccaaaggcgcagtgtgcttggacggcagcccaccggtgtaccatttctctcccggctccggttctggcgccaataactgggtcgtccacatggagggaggagggtggtgcaggaatcctgatgagtgtgctgtccgcaagggcaacttcaggggctcctccaaatttatgaagccactctcgttttcagggatattaggcggcaaccaaaaatccaatcctgatttctacaactggaatagagtaaagatcagatactgtgatggttcatcatttactggtgacgttgaggctgtggacactgcgaaagatctccgttacagagggttcagagtctggcgtgccgtcatcgatgatctacttactgtgaggggaatgagcaaggcgcaaaatgctcttctttctggatgctcagccggaggtctagcagcaatactacactgtgacagattccatgatctgtttccagcgaaaacaaaggtcaagtgtttttctgatgctggatattttttcgatgggaaggatatctccgggaacttttacgctaggtcaatctataagagcgttgtgaatctacatggatcagccaaaaatttaccagcttcatgtacctcaaagccaaagcaatcacctgagctgtgtatgttcccacagtatgttgtcccgacaatgcgcacaccattgttcatacttaatgcagcctacgattcgtggcaggtcaagaacgtcctagcacctagtccagctgatccgaagaagacttgggcccaatgcaagcttgacatcaagagctgctccgccagccaactcacaaccttgcaaaatttcaggacagattttctggcagcactccctaaaacgcagtctgtaggcatgttcatcgactcatgcaatgctcactgccaatcaggatctcaagacacgtggctagccgatggttctcccacggttaacaagacgcaaattggcaaggcggtgggggactggtactacgatagggaggtccctcggcagattgattgcccgtatccctgcaacccaacttgcaagaaccgtgatgatgattga

SEQ ID NO: 330 - protein, 397 aa, Zea mays
MAASGAWLARATATAVLGFVLAVASAEAASGDVEMVFLKAAVAKGAVCLDGSPPVYHFSPGSGSGANNWVVHMEGGGWCRNPDECAVRKGNFRGSSKFMKPLSFSGILGGNQKSNPDFYNWNRVKIRYCDGSSFTGDVEAVDTAKDLRYRGFRVWRAVIDDLLTVRGMSKAQNALLSGCSAGGLAAILHCDRFHDLFPAKTKVKCFSDAGYFFDGKDISGNFYARSIYKSVVNLHGSAKNLPASCTSKPKQSPELCMFPQYVVPTMRTPLFILNAAYDSWQVKNVLAPSPADPKKTWAQCKLDIKSCSASQLTTLQNFRTDFLAALPKTQSVGMFIDSCNAHCQSGSQDTWLADGSPTVNKTQIGKAVGDWYYDREVPRQIDCPYPCNPTCKNRDDD

SEQ ID NO: 331 - DNA, 1197 bp, Zea mays
atggcggacgggagcctctacgcctggtggtgttgtgccttgggctgggcgctggcgcttgtcgcagcggacggcttcctcgtggacatcacctatgtggaaagcgccgtggccaaaggagcagtgtgtttggatggtagtgcgccggcgtaccatctcgcccgcggctccggctccggtgagaagagctggctggtccatttcgaggggggaggctggtgcaacaatgtcaccacctgcctgcaacggaagcgcactcggttgggttcgtccaaggagatggcgacgcagattgccttctccggaatcctgagtgacacgccggatgacaacccagatttttacaattggaacaaggtcaaggttcggtactgtgatggttcatctttcactggagatgttgaagaagttgaccctgcaacaaagctacattatagaggtgcgaggatatggcaagctgtcatggacgacctgcttgccaaagggatggacaaagctgaaaatgctctaatttcaggctgttctgctggtggtttaacctccatactacactgtgacagatttcatgaccttctgccgccggctgcgagggttaagtgcctttctgatgctgggttcttcattaatgagaaagacgttgcaggagttgggtacattgctgcctttttcaacgacgtcgttacaacacatgggtcagcaaagaatttgccgccttcatgcacttcgacgttacctccaggaacgtgctttttcccccagaacgaggtgaaacagatacagacacctctgttcatcctcaacgcagcatatgattcatggcaggtaaggaacattttggtgccaggagtagctgaccctcatggaaaatggcatagctgtaagcatgatatagaccagtgctctgcatcgcagctacgggtattgcagggattcaggggtgattttctgaaggaagtggcagaactagggaactccgactcgagagggttgttcataaactcatgcttcgtgcactgccagtctgagatacaggagctatggttctcatctgactcccccgtgctcggaaacacaacagtagcaaacgctgttggcgactggttcttcgaccgcagctccttccagaagatagactgcccatacccttgtgactcgacctgtcacaatcggatctacgatgactcatcacaagcatag

SEQ ID NO: 332 - protein, 398 aa, Zea mays
MADGSLYAWWCCALGWALALVAADGFLVDITYVESAVAKGAVCLDGSAPAYHLARGSGSGEKSWLVHFEGGGWCNNVTTCLQRKRTRLGSSKEMATQIAFSGILSDTPDDNPDFYNWNKVKVRYCDGSSFTGDVEEVDPATKLHYRGARIWQAVMDDLLAKGMDKAENALISGCSAGGLTSILHCDRFHDLLPPAARVKCLSDAGFFINEKDVAGVGYIAAFFNDVVTTHGSAKNLPPSCTSTLPPGTCFFPQNEVKQIQTPLFILNAAYDSWQVRNILVPGVADPHGKWHSCKHDIDQCSASQLRVLQGFRGDFLKEVAELGNSDSRGLFINSCFVHCQSEIQELWFSSDSPVLGNTTVANAVGDWFFDRSSFQKIDCPYPCDSTCHNRIYDDSSQA

SEQ ID NO: 333 - DNA, 1182 bp, Medicago truncatula
atgaagtttataagaatggaccaattattcagtcttgtaatatgtacacttctattactaaaagcaacagaaggggttactgtgccaatcacttttgttcaaagtgcagtggcaaaaggagctgtttgtttggacggtagtccaccagcttaccactttgataagggatttgaagctggaattgacaactggattgttcactttgagggaggaggatggtgcaacaatgcaactacttgccttgaccggatcgacactcgtttaggaccatcgaagaaaatggataagacactttccttttctggattttttagtagcggcaaaaagtttaatccagatttctataattggaacagaatcaaggttaggtattgtgatggttcttcatttaccggcgatgttgaagctgtcgatccaaaaaccaatttgcactacagaggaggaaggatttttgttgctgtcattgaggatttactagcaaaaggaatgaaaaatgctaaaaatgcaattctctctggatgttcagctggaggattgacttctattttacaatgtgatcgcttcagaactttactacctgcagcagctaaagtgaaatgtgtctcagatgctggttattttatcaatgtaaaggctgtctccggagcatcacacatcgaacaattctacagtcaagttgttcaaacacatggctcagcaaagaatttgccttcatcttgtacttcaagactctcaccagggctgtgttttttcccccaaaacgtggccgcacaaatcaaaacaccgatcttctttgtaaatgcagcctatgattcatggcagattaagaacattttggcaccaggtgttgctgatcctcatggcacttggagaaactgcaagcttgatataaagagctgttctgctaatcaattaagtacaatgcaaggtttcaggacagaattcttaaaggcaattagtgtggttagtaattctccatctaaaggaatgtttatagatggctgctattcccaccgccaaactggaatgcaggaaacatggatgagaaccgactttccggtgctggccaaaacaacaatagcaaaggctgtaggagattggtattatgatagaagcacttttcagcagatagattgtccttatccttgcaaccctacttgtcataaccgtgtttttgaatga

SEQ ID NO: 334 - protein, 393 aa, Medicago truncatula
MKFIRMDQLFSLVICTLLLLKATEGVTVPITFVQSAVAKGAVCLDGSPPAYHFDKGFEAGIDNWIVHFEGGGWCNNATTCLDRIDTRLGPSKKMDKTLSFSGFFSSGKKFNPDFYNWNRIKVRYCDGSSFTGDVEAVDPKTNLHYRGGRIFVAVIEDLLAKGMKNAKNAILSGCSAGGLTSILQCDRFRTLLPAAAKVKCVSDAGYFINVKAVSGASHIEQFYSQVVQTHGSAKNLPSSCTSRLSPGLCFFPQNVAAQIKTPIFFVNAAYDSWQIKNILAPGVADPHGTWRNCKLDIKSCSANQLSTMQGFRTEFLKAISVVSNSPSKGMFIDGCYSHRQTGMQETWMRTDFPVLAKTTIAKAVGDWYYDRSTFQQIDCPYPCNPTCHNRVFE

SEQ ID NO: 335 - DNA, 1305 bp, Picea sitchensis
atgcttcttccaatggtcactgggaggaagatgacgaggggatctttggactttgaatttgctctgtttggggtggtcttgcttgtagtaatgtgtattggaaagtcagaaacttgggagattggcggtaggatcagcagcaatgtttcagaggtgagctgggaagaggcggcagtctcttatcctccaggtgctcttatggtgggcttgtctcttgtgaaaggtgcagcagagataggagctgtttgcttggatggaactttaccaggttatcatctaagtaggggatggggttcaggggcaaataattggctcatacagcttgagggtggaggatggtgtaatgatttgagaacatgtgtttaccgcaaaacaactcgtcgaggttcatcccgatacatggagcgtgaaatagtattttcagggattctaagcaataagcgttcagagaatccagatttttataattggaatcgagtcaagcttcgatattgtgatggtgcttcgttcgctggcgacatggaaggtgaaaatgaggttcctaaactttattttagagggcaaaggatttggcgagctgctatggcggatctcttggtagaaggaatgaagaacgcacaacaggctttgctttcaggatgctcagctgggggtttggcatcgatcattcactgtgatgattttcgggatttgatgccaaggagttctaaagtgaaatgtcttagtgatgctggattctttcttgacgtgatggatgtatctggagtgcactccttgagatctatctacaatggtgttgtgacaatgcagggagttgcaaagaacttaccaagagcatgtacctcacgaatggatccagctcagtgcttctttccacagcatctgttgcaggatattaagacaccacttttcatattgaatgcaggatatgactcatggcagatcctgagcagtttggtcccaacagctgctgatcctcagggccattggcacttctgtagattaaatccagctaattgcagtgctagtcagcttcaagtgttacaaggtttcaggatggacatgcttaatgaattgagggtgcttgctggctctcgagttggaggcatgtttatcaattcatgctttgcacattgccagtctgagaggcaggacacatggtttgctcctgactcaccgaggcttaagaagaccattgcagagtcagtgggggattggtattttgatcgaagtccttcaaaggaaatcgattgtgcatacccttgtgatcaaacttgtcacaacctcattttcaaatcgaaatag

SEQ ID NO: 336 - protein, 434 aa, Picea sitchensis
MLLPMVTGRKMTRGSLDFEFALFGVVLLVVMCIGKSETWEIGGRISSNVSEVSWEEAAVSYPPGALMVGLSLVKGAAEIGAVCLDGTLPGYHLSRGWGSGANNWLIQLEGGGWCNDLRTCVYRKTTRRGSSRYMEREIVFSGILSNKRSENPDFYNWNRVKLRYCDGASFAGDMEGENEVPKLYFRGQRIWRAAMADLLVEGMKNAQQALLSGCSAGGLASIIHCDDFRDLMPRSSKVKCLSDAGFFLDVMDVSGVHSLRSIYNGVVTMQGVAKNLPRACTSRMDPAQCFFPQHLLQDIKTPLFILNAGYDSWQILSSLVPTAADPQGHWHFCRLNPANCSASQLQVLQGFRMDMLNELRVLAGSRVGGMFINSCFAHCQSERQDTWFAPDSPRLKKTIAESVGDWYFDRSPSKEIDCAYPCDQTCHNLIFKSK

SEQ ID NO: 337 - DNA, 1251 bp, Arabidopsis thaliana
atgaggaagcttttcttgttagggtttatagttgcaggactggttcttgggaatgaggcaaatgggtatttagagttcaatgtcactgaattagatcgcattgaggatttagagtttggtttctccaaatttagttccaatttcaatccattaatggttggtctcacacttatcagaggagctggttctaaaggagctgtttgtttggatggtacattgcctggatatcacttacatcgtggacatggatctggagccaatagctggttaattcaattagagggaggaggatggtgtgacaacattaggaactgtgtataccgaaagaagtcgcgtcgcggatcttctaactatatggagaaacaaatacagtttacaggaatacttagcaataaagctcaagaaaatccagactttttcaactggaatcgagttaagcttcgttactgcgatggtggttccttcggtggagatagtcagaacaaggctgcacggcttcagtttagaggagagaagatatggagagccgcaatggacgatttgaaggcaaagggaatgcgaaatgcgaaacaggcacttctatctggttgctctgcaggtggtctagcagttattttacgctgtgacgaattcagaaacttgttttctggatggaccagagttaaatgcttaagtgatgcaggcttgttcttggacacgcctgatgtatccggtggacacactataaggaatttatataacggcgttgtgcagttgcagggagtgaagaacaatttgccacatttatgcactaaccatctcaatccaacctcttgtttcttccctcaaaacttgatcagtcagatgaaaactcctcttttcattgtcaatgcagcatatgatatttggcagattcaaagcagtatcgctccgccgagtgcagatcctagtggttattggcatgaatgcagattaaaccacggtagatgcactccggcgcagatacggttcttgcaagggtttagaaaccaaatgttgagagctgtgagtggtttctcgaattcgaaaaagaacggtttgttcatcaattcttgctttgctcattgccaaaccgaaaggcaagacacttggttcgccgatgattctcctgttatacacaaaaaggcggtggcgatagcggttggagattggtatttcgatagagctgaagtgaagctaatagattgtccatacccgtgtgataggagctgtcacaatctggtcttcagatga

SEQ ID NO: 338 - protein, 416 aa, Arabidopsis thaliana
MRKLFLLGFIVAGLVLGNEANGYLEFNVTELDRIEDLEFGFSKFSSNFNPLMVGLTLIRGAGSKGAVCLDGTLPGYHLHRGHGSGANSWLIQLEGGGWCDNIRNCVYRKKSRRGSSNYMEKQIQFTGILSNKAQENPDFFNWNRVKLRYCDGGSFGGDSQNKAARLQFRGEKIWRAAMDDLKAKGMRNAKQALLSGCSAGGLAVILRCDEFRNLFSGWTRVKCLSDAGLFLDTPDVSGGHTIRNLYNGVVQLQGVKNNLPHLCTNHLNPTSCFFPQNLISQMKTPLFIVNAAYDIWQIQSSIAPPSADPSGYWHECRLNHGRCTPAQIRFLQGFRNQMLRAVSGFSNSKKNGLFINSCFAHCQTERQDTWFADDSPVIHKKAVAIAVGDWYFDRAEVKLIDCPYPCDRSCHNLVFR

SEQ ID NO: 339 - DNA, 1260 bp, Zea mays
atggggcctccgcggggctggacactgcctgccgccgccgttgccacggccggcgtcgcctcggtggtggccaccatcatcttgtccgcggcggcggccgatgtggtcgaggagaggctgacggtgcccatgacgatcgtcgctggcgcagcgtcggcgggggcagtgtgcctcgacgggagcccgccggcgtaccacctgcacggcggctccggcgcgggcgcgcggagctggctgctccagttcgagggcggcggctggtgcaacgacgtgcggtcgtgcgcggagagggccgggacgcgccggggatcgacgcgcctcatggcaaaggccgagtccttctccggcatcctcagcaaccgtccggccatgaatccagacttttacaactggaaccgtgtgaagctgcgttactgcgacggcgggtccttcatgggcgattcagcagtgtatataaacagctcctcggtgctctacttcagtggccagaggatatgggacgctattgtcgccgatctgctcaggaagggactggcgagagccgacaaggttctgctctcaggctgttcggcaggaggcctagctacgttcttccactgcgacggccttaagcagcggcttggagccgcagccacggtgaaatgcctgagcgacgccggatttttccttgatctgagtgacatttctgggagcaacaccataaggcaattctttagcagcctagtatccctgcagggaatccagaagaatttgaacatggactgcctgagttcaacttcaacagacaatgcatacctgtgtttctttccacagttcgcgcttgcgaacatccgaaccccgtttttcatcttgaattcagcttatgatgtataccagttccaccacattctggtgccgccttcgtctgatcctggaggccattggagccgctgcaagtcggatcctggtggatgcaacgcaacacagatcgcaaccctccaaggactgagaagtggaatgctgacatctctgagacagtttaaaagcaaaccggaggcagggatgttcatcaactcctgcttcgcgcattgccagagtgagctgcaggacacatggttcgcaccaaattctccatccatagataacaagaaaattgcagaggtggtaggtgattggtacttcgaaagaggagctgccgtggagattgactgcgcctatccctgtgattcaacttgtcgcaaccttataccaattgataagaatgggttcgctggcgcatga

SEQ ID NO: 340 - protein, 419 aa, Zea mays
MGPPRGWTLPAAAVATAGVASVVATIILSAAAADVVEERLTVPMTIVAGAASAGAVCLDGSPPAYHLHGGSGAGARSWLLQFEGGGWCNDVRSCAERAGTRRGSTRLMAKAESFSGILSNRPAMNPDFYNWNRVKLRYCDGGSFMGDSAVYINSSSVLYFSGQRIWDAIVADLLRKGLARADKVLLSGCSAGGLATFFHCDGLKQRLGAAATVKCLSDAGFFLDLSDISGSNTIRQFFSSLVSLQGIQKNLNMDCLSSTSTDNAYLCFFPQFALANIRTPFFILNSAYDVYQFHHILVPPSSDPGGHWSRCKSDPGGCNATQIATLQGLRSGMLTSLRQFKSKPEAGMFINSCFAHCQSELQDTWFAPNSPSIDNKKIAEVVGDWYFERGAAVEIDCAYPCDSTCRNLIPIDKNGFAGA

SEQ ID NO: 341 - DNA, 1236 bp, Picea sitchensis
atggcgtttatccttatactaattttcattacagtggcaccgagaacaatatatgccaatacacagttccaatatcatggaggatccgtggcaaaaaaggtattgccagatgttaattcgaccaatgcaatgcttttagtaaacatcactgtgctgaacaatgcagtattcaaaggagctgtttgtttagatggaagcccgccagcttaccatttacacaggggatttggatcaggtgcaaatcgctggcttgttcacatggagggtggaggatggtgttacgacatgctgtcgtgttctggccgcgcagcgtctccattgggttcttctctgtacatgggagacacaatagcatttacaggcattttaagtgatgttcgatcacaaaatccagatttctatagttggaaccgcgttatggttagatactgtgacgggtcgtcattcactggagatgtggaggaggtagacccgatcaccaaggtccattttagagggcaaaggatttggcaagctgtaatggaagatctgttggctaaaggaatgtataaagcccggcaggctctactcactggatgctcagcaggtggagtaaccacatttattcactgcgatagatttaatgatcttctaccaggcagtgccaaagtcaagtgcatgccagatgctggatttttcattgattcgaatgacatatcaggaggaaaccagcagagatttttagttgatcaaatggtcacacttcatggatcttcaaaacacttgcctgtggcttgcacatctgaaatgattccttcaagtctgtgttttttcccacaatatctcttacagtggatcaggacgccacttcttgttgtaaattcagcatatgatccattgcagattagattcattctcgtacctgctgcagctgatcccaataattattggcggaactgcaagatgaatatcacaaggtgtgctccatggcaattaagagtaatggaagaattcacagattatatgatcagtgcattaacaccagtgtccaactcaagaaccggagggctgtttatcaattcatgctacgcacactgccagacaaatgtacaagctctgtggcactcgcctagttctcccaggttatattcaaagaccattgcagaagcagctggagattggtattttggtcgaagtgttgtcaagtatattgattgtccatatccttgtgattctacttgtaataacagtttctga

SEQ ID NO: 342 - protein, 411 aa, Picea sitchensis
MAFILILIFITVAPRTIYANTQFQYHGGSVAKKVLPDVNSTNAMLLVNITVLNNAVFKGAVCLDGSPPAYHLHRGFGSGANRWLVHMEGGGWCYDMLSCSGRAASPLGSSLYMGDTIAFTGILSDVRSQNPDFYSWNRVMVRYCDGSSFTGDVEEVDPITKVHFRGQRIWQAVMEDLLAKGMYKARQALLTGCSAGGVTTFIHCDRFNDLLPGSAKVKCMPDAGFFIDSNDISGGNQQRFLVDQMVTLHGSSKHLPVACTSEMIPSSLCFFPQYLLQWIRTPLLVVNSAYDPLQIRFILVPAAADPNNYWRNCKMNITRCAPWQLRVMEEFTDYMISALTPVSNSRTGGLFINSCYAHCQTNVQALWHSPSSPRLYSKTIAEAAGDWYFGRSVVKYIDCPYPCDSTCNNSF

SEQ ID NO: 343 - DNA, 1317 bp, Hordeum vulgare var. distichum
atggccgccgtcaccgagcagctcctccttccccatgagcagcaccgtcgacgtccggcacgggtgcttgctgtcaccgtatcggtcgcagtggtcctgctgctgctgctggtggtggtccctgccagcctcctccgtcgtacgctgctcggcgcgccatcgacggaccgcgtcgcgctcaccctcctcgctggtgcgaaggagaagggcgcagtgtgcctggacggaacaccgccggggtaccacctgcagaggggctccggtgagggcgccgaccgctggctcgtccatctagagggaggaggctggtgcagcacagtcaaggaatgttccgaccgcagactgtccagccaaggttcatccaacttcatgagatcgataaggttcatgggcaatgggatcctcggcggtgatcagctgcagaatcctgatttctacaactggaacaaagtctacgtgcggtactgcgatggcgcatcgttttctggcgacgcggaagctcaagcagaggatggaaccacactatacttcagaggattgcgtatctatgaagcagttatcgacgaactcatggaaaaaggactcgccagtgctacacaggccctctttacaggctgctctgctggtgctctatccatgatgctgcattgcgatgatttccgtgcaagatttcctcaggaggtttcagttaaatgctttgcggatgctgggttcttcattgatgaaaaggatatatccggaaaaaggtccctttggtctctgtacgatagagtcattcacctccagaatgttagaaaagtgttgcccaaggactgccttgccaacaaggagccaaccgagtgtttcttcccggcagagcttattaagagcatccgcaccccaatgtttattctcaaccctagttatgattcatggcagatacgaaatgttcttgtacctgattcatctgctcctgacaagtcatggttgagttgcaaggaaaatatccgaaactgcaactctacacaagttgaagtcctcaatggattgaggaataagatggtcaatgacttgaaggtcgtcgaagataaggaggactggggcatgttcatcgactcatgcttcacgcactgccaatccctctccggcatctcttggcattcgccaacctccccgaggcttgaaaataagaccattgcagaagctgttggagactggcactctggaaggagccaaggagcgaaagagattgactgcaagtatcagtgcaacccaacatgcaatagtttaccgcctccacgagatgttactgcattcgaccgtgtcgagatctactaa

SEQ ID NO: 344 - protein, 438 aa, Hordeum vulgare var. distichum
MAAVTEQLLLPHEQHRRRPARVLAVTVSVAVVLLLLLVVVPASLLRRTLLGAPSTDRVALTLLAGAKEKGAVCLDGTPPGYHLQRGSGEGADRWLVHLEGGGWCSTVKECSDRRLSSQGSSNFMRSIRFMGNGILGGDQLQNPDFYNWNKVYVRYCDGASFSGDAEAQAEDGTTLYFRGLRIYEAVIDELMEKGLASATQALFTGCSAGALSMMLHCDDFRARFPQEVSVKCFADAGFFIDEKDISGKRSLWSLYDRVIHLQNVRKVLPKDCLANKEPTECFFPAELIKSIRTPMFILNPSYDSWQIRNVLVPDSSAPDKSWLSCKENIRNCNSTQVEVLNGLRNKMVNDLKVVEDKEDWGMFIDSCFTHCQSLSGISWHSPTSPRLENKTIAEAVGDWHSGRSQGAKEIDCKYQCNPTCNSLPPPRDVTAFDRVEIY

SEQ ID NO: 345 - DNA, 1275 bp, Hordeum vulgare var. distichum
atggcgccggggacgaccgagccgctcctcctccgcccggagcagcgccggcgtccgcgggactggttcgcgtgggggctgccggcggcggtcctgctcctgctgctgctgtccgtctccggccctctccgtccgccgcttttccgcgtgccggcgccggagaccgtcccgttgaccctgctcgccggcgcgcaggagaagggagcagtgtgcttggacgggaccccgccggggtaccacctgcagagaggctccggcgacggatccaaccgctggctcatccatctcgagggaggaggttggtgcagtacagtcaaggattgttccaaccgcagaatgtacgcgctcggttcatccaacttcatgaaaccgatgcgcttcgccggtgctgggatcctcggcagtgatcagctgcaaaatcctgatttctacaactggaacaaagtgtttgtgcggtattgcgatggggcgtcgttttccggggacgcggaaggtcgagcacaggatggaagcatactttacttcagaggattgcgcatctaccaagcggtccttgacgaactcatggaaaaaggacttgccaacgctacacaggccctcctcacaggctgttctgctggtggtctagccacgatactgcattgcgatgatttcagtgcacggttttctcgtgatgtttcagttaaatgccttgctgatgctgggttttttcttgacgtaaaggatatttctgggaaaaggtccttttggtctgtctatgatggcgttgttcacctccagaatgttagagaagtgttgcccaaggactgccttgccaacaaggagccaaccgagtgtttcttccccgcagagcttattaagagcacccgcacccccatgtttattctcaactctgcgtatgattcatggcaggtacggaatgttcttgtaccagtttcgtcggctcctgataagtcatggtcgagttgcaaggataatatccggaactgcaattccacacaaatcaaagtcctcaatggcttcaggaacacaatggtgggtgcattgaatgttgtcgaagataaggaggactggggattgttcatcgattcatgcttcacacactgtcaatccctatatggcatctcctggaattcagaaatctccccgaggcttggaaataagaccattgcagaggccgcaggagattggtaccatggaaggagccgaagagtgaaagagatagactgcgagtatccatgcaacccaacatgcagcggacagttgcctccatga

SEQ ID NO: 346 - protein, 424 aa, Hordeum vulgare var. distichum
MAPGTTEPLLLRPEQRRRPRDWFAWGLPAAVLLLLLLSVSGPLRPPLFRVPAPETVPLTLLAGAQEKGAVCLDGTPPGYHLQRGSGDGSNRWLIHLEGGGWCSTVKDCSNRRMYALGSSNFMKPMRFAGAGILGSDQLQNPDFYNWNKVFVRYCDGASFSGDAEGRAQDGSILYFRGLRIYQAVLDELMEKGLANATQALLTGCSAGGLATILHCDDFSARFSRDVSVKCLADAGFFLDVKDISGKRSFWSVYDGVVHLQNVREVLPKDCLANKEPTECFFPAELIKSTRTPMFILNSAYDSWQVRNVLVPVSSAPDKSWSSCKDNIRNCNSTQIKVLNGFRNTMVGALNVVEDKEDWGLFIDSCFTHCQSLYGISWNSEISPRLGNKTIAEAAGDWYHGRSRRVKEIDCEYPCNPTCSGQLPP

SEQ ID NO: 347 - DNA, 1179 bp, Hordeum vulgare var. distichum
atgggggagaagatgaggatgaccaagctttgggcgcttcctcttgtggttttggtcctcggggcgtcggcgccgagcgtaccggcggtgcctatcaccatcctcacgtccgccgtcgccaagggggccgtgtgcatggatggtacgccgccggcctaccacatggacccggggtccggtgcagggaagaagagctggatcgtcaacctggagggaggcggatggtgcgagagcgtgatggcgtgcatgtaccgcaagggcagccgcctcggctcctcgaacctcatggagaggcagctggagttccgtggcatcttgagctccaaccccgctgagaaccctgatttctacagctggaaccgggtgatggtccgctactgcgacggcgcgtccttcaccggcgaaggctacaacgcgggctcgaaggtctatttccggggccagcgcatttggaacgccgtcatgcagcacctcctctccattgggatgtcgtcggcggatcaggtgctgctggcgggcggctccgccggggggctgtcggcgatcctgcactgcgaccagttcggcaccttcttcgccggccggagcaccaccgtcaagtgtctcgccgacgcaggactcttcctggacgccgtcgacatctccggcggccgtactttgagatcctatttcggaggcattgtagccacgcatggggtggctcagaacctgcccaggagttgcaccggtcatctcgacgccacctcgtgcttcttcccccagaatataatcggcagcataaatacccccatcttcctgctgaatgcagcctacgatacctggcagatccatgaaagcctggccccggacgtggccgaccacaacggcacgtggcgagcctgcaagtccaatcgtttagcttgcaacgcatcccagatgaaagtcttgcaagctttcagggaccagatggtgggaattgtccaaggcttgtcccgctccaagagctacggcctcttcatcaactcgtgcttcacgcacggccagtccaaagtcccggctacttggaatgcaaatggctctcctactattcataataagagcattgcgaaatctgtgagtgactggtactttggccgggctgaagtgagggccatcgattgcccctacccctgcgaccacacatgccatcacgacatgtga

SEQ ID NO: 348 - protein, 392 aa, Hordeum vulgare var. distichum
MGEKMRMTKLWALPLVVLVLGASAPSVPAVPITILTSAVAKGAVCMDGTPPAYHMDPGSGAGKKSWIVNLEGGGWCESVMACMYRKGSRLGSSNLMERQLEFRGILSSNPAENPDFYSWNRVMVRYCDGASFTGEGYNAGSKVYFRGQRIWNAVMQHLLSIGMSSADQVLLAGGSAGGLSAILHCDQFGTFFAGRSTTVKCLADAGLFLDAVDISGGRTLRSYFGGIVATHGVAQNLPRSCTGHLDATSCFFPQNIIGSINTPIFLLNAAYDTWQIHESLAPDVADHNGTWRACKSNRLACNASQMKVLQAFRDQMVGIVQGLSRSKSYGLFINSCFTHGQSKVPATWNANGSPTIHNKSIAKSVSDWYFGRAEVRAIDCPYPCDHTCHHDM

SEQ ID NO: 349 - DNA, 1212 bp, Hordeum vulgare var. distichum
atggcgccaagcaacgtaccagaggcactgctccggctcctgctgctggccgcttccggccttctcggtcctatgctatccggcgcagcgccggtcgagcccgtcgaggtcagcctcctcgtcggcgcacaggaaaagggagcagtgtgcttggacgggaccccgccggggtaccacctgcagagaggctccggtgatggatccggcagctggctcatccatctagagggaggaggctggtgcagcacactcaaggattgttccggtcgcagaatgtctgttcttggttcatcaaacttcatgaaaccactacagtttgccggtcatgggatttttgacagtgatgagatatataatcctgatttctacaactggaacaaagtctatgtacggtattgcgatggggcatcatttgccggggatgcagaaggtcaagcgcaggatggaaccacagtttacttcagagggttgcgcatctatgaagcaattactgacgaactcatgcgaaaaggcctcgtcaatgctacacaggtgctctttacaggttgttctgccggaggtctagccacgatactgcactgcgatgattttagtgcacggtttcctcagcaggtttcagttaaatgctttgcggatgctgggttttttcttgacgtaaaggatatttctggagaaaggtccttttggtctttatacaaccgagttgtgcagctccagaatgttagacaagtgttgcacaaggactgccttgccaacaaggagccaactgagtgtttcttccccacagagattattaagagcatccgcacccccatgtttattctcaactctgcgtatgattcatggcagatacagaacgttctcctaccgagttcatcttctccagaaaagtcatggttgagttgcaaggataatatcggaaactgcaactcaacccaaattaaagttcttgatgaattcaggaatacaatgatcaatgatttgaacatcgtcgaagataaggcaggatggggcatgttcattgattcatgcttcactcactgccaaacgctctttcgcatctcttggaattcaccaacatccccaaggcttggaaataagaacattgcaaaggttgttggagattggtactttggaaggagccaaggagtgaaagagattgactgccagtatccgtgcaacccaacatgcaatagtctcccacctccatga

SEQ ID NO: 350 - protein, 403 aa, Hordeum vulgare var. distichum
MAPSNVPEALLRLLLLAASGLLGPMLSGAAPVEPVEVSLLVGAQEKGAVCLDGTPPGYHLQRGSGDGSGSWLIHLEGGGWCSTLKDCSGRRMSVLGSSNFMKPLQFAGHGIFDSDEIYNPDFYNWNKVYVRYCDGASFAGDAEGQAQDGTTVYFRGLRIYEAITDELMRKGLVNATQVLFTGCSAGGLATILHCDDFSARFPQQVSVKCFADAGFFLDVKDISGERSFWSLYNRVVQLQNVRQVLHKDCLANKEPTECFFPTEIIKSIRTPMFILNSAYDSWQIQNVLLPSSSSPEKSWLSCKDNIGNCNSTQIKVLDEFRNTMINDLNIVEDKAGWGMFIDSCFTHCQTLFRISWNSPTSPRLGNKNIAKVVGDWYFGRSQGVKEIDCQYPCNPTCNSLPPP

SEQ ID NO: 351 - DNA, 1182 bp, Hordeum vulgare var. distichum
atgatggcatttgggctgccccgcgcggcggcggtgacgctgttgctgtgcctcgccgcggcgtcggccgcgtcggacgatgtggtgtcgatggtgttcgtgaaaagcgcggtggccaaaggagcggtgtgcctggatgggagccccccggtgtaccacttctccccgggctccggctccggcgccgacaactgggtggttcacatggagggaggagggtggtgcaagacccctgaagagtgtgcagtccggaagggcaacttcaggggctcctccaagtacatgaagccactctccttctcagggatccttgggggcagccagcagtacaaccccgatttctacaactggaacagagtcaaggtcagatactgcgacggctcatcgttcaccggcgatgttgaagaagtggactcctcgacgaacctgcactacaggggggccagagtttgggacgccatcatcgaagatctgctcaacagagggatgagcaaggccaagaatgccattctttctgggtgttcggccggaggtctagcggcaatactgcattgtgacaaattcaatgacctccttccaccgtctgcatctgtaaagtgcgtttctgatgctggttattttattgatgggacggatattaccggcaacaagtttgtcaggacatccttcaagaacgttgtaaacctacatggatcggttaaaaatttgccatcttcatgtacctcgaggacgtcgcctgagctgtgcttcttcccacagcatgtcctcccaacattgaaaacgccgctgttcatacttaacgcggcgtatgattcatggcagatcaggaacatcctggtgcctagcgccgccgataagaagaaggagtgggccaaatgcaagcttgacataaagggctgctcctccagccagctagtgaccttacaacatttcagggacgagtttctgtcagcgctccctaaaccggggcaatctccttcggtaggcatgttcatagactcgtgctttgctcactgccaatctggagcccaagactcgtggaatgccgacggttccccttcgcttcagaagacgaaaattggcaaagcggtgggggactggttcttcgaccgggctgtgtctcagcggattgactgcccgtatccctgcaaccagtcctgcattgacaatgaagatgactga

SEQ ID NO: 352 - protein, 393 aa, Hordeum vulgare var. distichum
MMAFGLPRAAAVTLLLCLAAASAASDDVVSMVFVKSAVAKGAVCLDGSPPVYHFSPGSGSGADNWVVHMEGGGWCKTPEECAVRKGNFRGSSKYMKPLSFSGILGGSQQYNPDFYNWNRVKVRYCDGSSFTGDVEEVDSSTNLHYRGARVWDAIIEDLLNRGMSKAKNAILSGCSAGGLAAILHCDKFNDLLPPSASVKCVSDAGYFIDGTDITGNKFVRTSFKNVVNLHGSVKNLPSSCTSRTSPELCFFPQHVLPTLKTPLFILNAAYDSWQIRNILVPSAADKKKEWAKCKLDIKGCSSSQLVTLQHFRDEFLSALPKPGQSPSVGMFIDSCFAHCQSGAQDSWNADGSPSLQKTKIGKAVGDWFFDRAVSQRIDCPYPCNQSCIDNEDD

SEQ ID NO: 353 - DNA, 1302 bp, Hordeum vulgare var. distichum
atgccgccgtcccccgccgcgtgcgccccggcgagccgccacctgcgcctctggtggcgccgccgcggccgggccggcgccgtcgcggccaccttcgccgccgcgctcgtcgccgcggccctcctcctctcgctctcctacttcgcatccctcgtgcccctatcgcccaacgcctcccccgccctcgtcggcctcaccctcctccgccgcgccgaggagaagggcgccctgtgcttggacgggagcgcgccggggtaccatctgcagagggggtcggggggtgggtctcggagctggctcatccacttggagggtggaggctggtgccgaaatttgaagtcgtgcgcttcgcgccagaaatcgatcctgggttcttcccattacatggaacgccaggttgagtttgctgggatgttgagcgatgatgaagatcagaatccagattttcacaactggaataaagtgaagataaggtattgtgatggggcatcattttctgggaatgtcaaagacgagttgcagaatggcacaaaattctttttcagaggccagcgtatctgggaagcagttatggatgaacttctactgaagggtctcagacatgctaaacaggcttttctaacaggatgctctgctggtgggttagccacttacattcactgtgatggttttcgggcactgctgccaaaagaatctagggttaagtgtcttgcggatggtggttttttccttgatgtagaagacatttccaagcaaaggaccttgcgggctttctacagtgatgttgtccgtcttcaggatctcaagaggaagtttttgggctgcagttcaagcatggacccgggccagtgcttctttcctcgtgaagttgttaaagacatcaggacaccagtatttgttcttaatccagcatatgatgcctggcaggtacaacatgtgttggcaccagaagcatcggatccccaacattcatggcaagactgtaggttggatattagcaagtgtagtcctgaccaacttgaaatactccaaggttttagggaggagctgcatgacgcgatgagagaaatcaagcagaaaaaggactggggtattttcattaactcctgctttatacactgtcagacgttgagctcattgacttggcactctccatcttctcctagagtcaacaacaagaccatggcagaagcagttggagactggttctttgacaggagagaggtgaaggaactagattgcgaatatccgtgcaacccgacgtgccacaacctggttttttccaagcccttcaagggataa

SEQ ID NO: 354 - protein, 433 aa, Hordeum vulgare var. distichum
MPPSPAACAPASRHLRLWWRRRGRAGAVAATFAAALVAAALLLSLSYFASLVPLSPNASPALVGLTLLRRAEEKGALCLDGSAPGYHLQRGSGGGSRSWLIHLEGGGWCRNLKSCASRQKSILGSSHYMERQVEFAGMLSDDEDQNPDFHNWNKVKIRYCDGASFSGNVKDELQNGTKFFFRGQRIWEAVMDELLLKGLRHAKQAFLTGCSAGGLATYIHCDGFRALLPKESRVKCLADGGFFLDVEDISKQRTLRAFYSDVVRLQDLKRKFLGCSSSMDPGQCFFPREVVKDIRTPVFVLNPAYDAWQVQHVLAPEASDPQHSWQDCRLDISKCSPDQLEILQGFREELHDAMREIKQKKDWGIFINSCFIHCQTLSSLTWHSPSSPRVNNKTMAEAVGDWFFDRREVKELDCEYPCNPTCHNLVFSKPFKG

SEQ ID NO: 355 - DNA, 1251 bp, Hordeum vulgare var. distichum
atggagaagatcatgatagccaagctttgggagatttttcttatggttttggtcttcacggggagcgcgcaggcggcagccgacgggaacatgagccgtggtggtatgaggcggctcgccggggcgccggtcgccccagtgcctatcaccctcctcacgtccgccgtcggcatcggagccgtgtgcatggacgggacgccgccggctttccacatggatccgggctccggtgaagggaagaaccgttggatcgtccacctagagggaggctcatggtgcgagagcctggggtcgtgcctgtaccgcaaggcgagccgcctcggctcgtcggatctcatgaacaaggagctgatgtacttcggcggcatcttgagctccagccccgccgagaaccctgatttcttcagctggaaccgggtgatgatccggtactgcgacggcgcgtctttcgccggcgaaggctacgacgcgggcacggggctcttcttccggggccagcgcatatggaacgccgtcatgcagcacctcctctccatcgggatgtcctccgcggatcacgtgctgctgacggggagctccgccggggccctggcggtggtgctgcactgcgaccagttcggcgccttcttcgccggccgggacaccaccgtcaagtgcctcgccgacgcaggattcttcctcgacgccgtcaacgtcgccggggggcgtaccttgagatcctacttcggaggcgtcgtggccacgcatggggtggctcagaacctgccgacgagttgcaccgatcatctgaacgccacctcgtgcttcttcccgcagaatataatcggcggcatagataccccaatcttcgtgctgaatgcagcctacgatacctggcagatccgggaaagcctggccccggacggagccgatcccagcggcgcctggcgagcctgcaagtccaatcgtttagcctgcaacgagttacagatgaacatcttgcaagcctttaggaaccaaatggtggtcactgtgctacgcgtcgtctcccgttccaggagcaacgggtatttcataaactcgtgcttcactcacggccagaccgagaacccagctacttggaatgcatatgactctcctgctattcagaacaagacaatctggaaatctgtgggtgactggtactttggccgggctgaagtgagggccatcgactgcgcctacccctgcgattacacatgctatcacgacatggaggaccaactgatttga

SEQ ID NO: 356 - protein, 416 aa, Hordeum vulgare var. distichum
MEKIMIAKLWEIFLMVLVFTGSAQAAADGNMSRGGMRRLAGAPVAPVPITLLTSAVGIGAVCMDGTPPAFHMDPGSGEGKNRWIVHLEGGSWCESLGSCLYRKASRLGSSDLMNKELMYFGGILSSSPAENPDFFSWNRVMIRYCDGASFAGEGYDAGTGLFFRGQRIWNAVMQHLLSIGMSSADHVLLTGSSAGALAVVLHCDQFGAFFAGRDTTVKCLADAGFFLDAVNVAGGRTLRSYFGGVVATHGVAQNLPTSCTDHLNATSCFFPQNIIGGIDTPIFVLNAAYDTWQIRESLAPDGADPSGAWRACKSNRLACNELQMNILQAFRNQMVVTVLRVVSRSRSNGYFINSCFTHGQTENPATWNAYDSPAIQNKTIWKSVGDWYFGRAEVRAIDCAYPCDYTCYHDMEDQLI

SEQ ID NO: 357 - DNA, 1368 bp, Hordeum vulgare var. distichum
atgagccagggtgcgtcactcccttgctatgcgctcgttaaatatacagtacgtcgctcagggattttcatatcgatcggcgatcttgcttctactcagcagcccattgatacgatggtgaagacgaggatcggtgccgtcgggccttgggcgcttctcgctctggtcctcctcctcgccggcagctgcgcctgcgtgcaggcggcgggcgagcagaagaacggcggtggcagaaggaggaggacgcatcgacggtcggcggcggccgtcgcgggcatgatggtgcctatcaccttcctcaacgcctccgtcgagaagggcgccgtgtgcatggatgggacgccggcggcttaccacctggacccgggctccggggcagggaacaagagctggatcgtcaacctcgagggaggcgggtggtgcaacaacgcgaggacgtgcaagttccggacaaggagccgccatggctcctccaacttcatggagcggcagatagccttcaccggcatcatgagcgccagccccgccgacaatcctgatttccacaactggaaccgggtgaagatccgctactgcgacagcgcgtccttcgccggcgacgccttcgacgaggctactgggctctacttccgggggcagcggatctgggaggaagccatccagcacctcctctccatcgggatggcgtcggccgaccgggcgcttctcaccggctgctccgccggggggctggcggcgatactgcactgcgaccagttcggcgccttcttcgccggccgaagcaccaccgtcaagtgcctcgccgacgcaggcctcttcctcgacgccgtggatgtctccgggggccgcagcctgagatcatactacagcgacattgtagccatgcagggggtggctcagcacctcccgccgacctgcaccgatcacctcgacgccacctcgtgcttcttccctcagaatataatcgacagcatcaagacccctatcttcttgcttaacgcagcctacgacgtctggcagattgaggaaagcctggccccgaacaaggctgaccccagccgcgcctggcgagcctgcaagttcaaccgctcggcctgcaatgcgtctcagatagacttcctgcaagatttcagggagcagatggtggcgtctgtgagggtcttctccggttccaagagcaacgggctcttcataaactcgtgcttctcccactgccagtccgaactgccagccacctggaatggcacacctgccattcagaacaagaggatcgcgaaatctgtcggcgattggtactttggccgggccgaagtgaaggcgatcgattgcccatacccctgcgacaacacatgccgccacatcatataa

SEQ ID NO: 358 - protein, 455 aa, Hordeum vulgare var. distichum
MSQGASLPCYALVKYTVRRSGIFISIGDLASTQQPIDTMVKTRIGAVGPWALLALVLLLAGSCACVQAAGEQKNGGGRRRRTHRRSAAAVAGMMVPITFLNASVEKGAVCMDGTPAAYHLDPGSGAGNKSWIVNLEGGGWCNNARTCKFRTRSRHGSSNFMERQIAFTGIMSASPADNPDFHNWNRVKIRYCDSASFAGDAFDEATGLYFRGQRIWEEAIQHLLSIGMASADRALLTGCSAGGLAAILHCDQFGAFFAGRSTTVKCLADAGLFLDAVDVSGGRSLRSYYSDIVAMQGVAQHLPPTCTDHLDATSCFFPQNIIDSIKTPIFLLNAAYDVWQIEESLAPNKADPSRAWRACKFNRSACNASQIDFLQDFREQMVASVRVFSGSKSNGLFINSCFSHCQSELPATWNGTPAIQNKRIAKSVGDWYFGRAEVKAIDCPYPCDNTCRHII

SEQ ID NO: 359 - DNA, 1185 bp, Populus trichocarpa
atggctggttcaagattaggccaatggccttgtcttgttgtttgcatactgatattgctcaaggcagaaggagctagcattcccattactattatcgagactgctgtttcaagcggagctgtttgcttagatgggagtcagccaggttaccactttgacaaaggatctggttctgggattgataactggttggttcacatggagggaggaggatggtgtgagagtgttgagtcctgtgtatctcgtagggacactttcaggggttcttcatcgaaaatggagaagacaatggggttctctggcatactgggcagcaagcaagcagctaatcctgacttctataactggaatagaatcaaagtcagatactgtgacggttcatcattcactggtgatgtcgaagctgtcgatccggaaactaagctttacttcaggggagagagggtttggcaggctgtaattgatgaactattggcgaaaggaatgcaaaatgctcgaaatgctattctttccggatgttctgctggtggattggctgctattttgcattgtgataaattccaatccctcctgcctgcaactgctagagtaaaatgtgtttctgatgctggttattttattcacgggacggacatttctggagggtctcgaattgaatccttcttcggtcaagtcgttaaaactcatggatcagcaaagaatttgcctgcatcatgcacttcaaaaatgaatccggagttgtgtttcttcccacaatatgtggcgcagactatgcgaacaccacttttcatcataaactcagcttacgattcctggcagataaaaaacattcttgcaccaacagctgttgattccaaaaaagaatggaaggactgcaagcttgatttgaaaaaatgctcagctagtcaactccagaccgtgcaagattacaggacacaattcttaaaagcagtggatactggacttggcagctcttcaacaagaggattgtggatagattcttgctatgctcactgccaatctgggtcggtatctacctggttaaacgataaatctcccgaagtgggcgatacgaaaatgggaaaggctgttggagattggttctacgaccgaagtgccatggaaaaaatcgattgcccttactcttgcaaccctacttgtgtcagtgttgattctgaatcgtaa

SEQ ID NO: 360 - protein, 394 aa, Populus trichocarpa
MAGSRLGQWPCLVVCILILLKAEGASIPITIIETAVSSGAVCLDGSQPGYHFDKGSGSGIDNWLVHMEGGGWCESVESCVSRRDTFRGSSSKMEKTMGFSGILGSKQAANPDFYNWNRIKVRYCDGSSFTGDVEAVDPETKLYFRGERVWQAVIDELLAKGMQNARNAILSGCSAGGLAAILHCDKFQSLLPATARVKCVSDAGYFIHGTDISGGSRIESFFGQVVKTHGSAKNLPASCTSKMNPELCFFPQYVAQTMRTPLFIINSAYDSWQIKNILAPTAVDSKKEWKDCKLDLKKCSASQLQTVQDYRTQFLKAVDTGLGSSSTRGLWIDSCYAHCQSGSVSTWLNDKSPEVGDTKMGKAVGDWFYDRSAMEKIDCPYSCNPTCVSVDSES

SEQ ID NO: 361 - DNA, 1467 bp, Glycine max
atgaaggtgattctattactcatagcagcatcattttcctttgtttctgtacttagatctgaggctgagcatttgttccaaaacgatgccgtttcactggcagtggaagtaccgcccggacctccacctctcatggtccccctcactctcattcagggagctgcttccaaaggagccgtctgtttggatggaacattgcctggttaccactttcatcctggatttggatctggggcaaatagttggctcattcaattggagggaggaggatggtgtaataccatcagtagttgtgtctttagaaaaactactcgtcgtggttcctcaaaatacatggaaaagcaactagcattcacagggttgttgagcaataaagctgaagaaaaccctgatttctttaactggaacagagttaaagtacggtactgtgatggagcatctttcagtggagatagtcaaaacgaggttgcacagcttcaatttcgaggacaaaaaatatggcaagctgcaatgcaggaattattgttcaagggaatgcagaaggccaaccaggcccttttgtctggatgctctgcaggtggtctggcatctataatacattgtgatgagttccggagcttgtttcctacatctaccaaagtgaaatgtttgagtgacgccgggtttttcctagatgcagttgatgtatctgggggtcacacactgaggaatctgtttggaggtgtagttaagttacaggaggtgcaaaaaaatctgccaaatagttgtctcaaccaactggacccaacttcgtgtttttttcctcagaatttgatcaactatgttgagactccactgtttctgctcaatgcagcttatgatgcatggcaggtccaagaaagtttggtcccacattcagcagatccccatggctcttggaatgattgtaaagcaaatcatgcacactgtaactcatctcaaattcagttcctccaagacttcagaaatcaaatgctaaatgatgtgaaaggcttctctgagacatctcaaactgggttattcataaattcttgttttgctcattgccagtctgagagacaagatacatggtttgctgatgactctccactcattaacaacgtgccagttgcaattgctgttggagactggtttttggatcggaaaactgtcaaagctatcgactgtgcttacccctgtgacaatacctgccataatctggtcttcaatgctggtaaatctgctgcggtggactaccagtccacaagtgatgatggcatacctaccaataccatgaccatgatatattcccactccacgaggctgacttttagtactggcctatatatgctacgtgttttattggcatttacatgttcctagtgcactatggacagttttagcccagaaaaacaaatgtactatgggcagattcgttagtccctattcaatcttccatttaagccactt

SEQ ID NO: 362 - protein, 459 aa, Glycine max
MKVILLLIAASFSFVSVLRSEAEHLFQNDAVSLAVEVPPGPPPLMVPLTLIQGAASKGAVCLDGTLPGYHFHPGFGSGANSWLIQLEGGGWCNTISSCVFRKTTRRGSSKYMEKQLAFTGLLSNKAEENPDFFNWNRVKVRYCDGASFSGDSQNEVAQLQFRGQKIWQAAMQELLFKGMQKANQALLSGCSAGGLASIIHCDEFRSLFPTSTKVKCLSDAGFFLDAVDVSGGHTLRNLFGGVVKLQEVQKNLPNSCLNQLDPTSCFFPQNLINYVETPLFLLNAAYDAWQVQESLVPHSADPHGSWNDCKANHAHCNSSQIQFLQDFRNQMLNDVKGFSETSQTGLFINSCFAHCQSERQDTWFADDSPLINNVPVAIAVGDWFLDRKTVKAIDCAYPCDNTCHNLVFNAGKSAAVDYQSTSDDGIPTNTMTMIYSHSTRLTFSTGLYMLRVLLAFTCS

SEQ ID NO: 363 - DNA, 1629 bp, Glycine max
tctcagctacgtaggcccccccccccccccatgttttcaaagatttgtaagaaaaaaactgaaaacaactttctttttttctctgtacaaaatggagatcactagaataggccaatggttaagtcttctgatatgtgtactactattactgcagacagaaggggttcctgtgggaatcacttttgttgaaaatgcagtggcaaaaggggctgtttgtttggatgggagtcctccagcttaccacttccacaagggatctggagcagggattaacaactggatagttcactttgagggaggaggatggtgcaacaacgttactacttgcctttcccgtagggacactcgattaggttcatctaagaaaatggatacatcactttccttttctgggtttttcagtaacagtaaaaagttcaatccagatttctatgattggaacagaatcaaggttaggtattgtgatgggtcatcatttactggtgatgttgaagctgttgatccgaaaaccaatttgcacttcagaggagcaagggtttttgctgtggtcgttgaggatttattagcaaaaggaatgaaaaatgctcaaaatgcaattatctccggatgttcagctggaggattggcttctattctaaattgcgatcgattcaaatcactactacctgcaacaactaaagtgaaatgccttgcagatgctggtttttttatcaatgtaaaggatgtctctggagcacagcgcattgaagagttctacagtcaagttgttcaaacacatggctcagcaaagaatttgcctacatcctgcacttcaagactcagaccagggctgtgctttttccctcaaaatgtcgtgtcccaaatcagtaccccaatcttctttgtaaatgcagcctatgactcatggcagatcaaaaacattttggcaccaggtgctgctgatccccgtggccaatggcgtgaatgcaagcttgatatcaaaaactgctcacctaatcaactcagtgtaatgcaaggattcaggacagatttcttaagggcatttagtgtggttggcaacgccgcatctaaagggcattttatagatggttgctatgcacactgccaaactggaatacaagagacatggctgagaaatgactccccagtggtggccaagacatcaattgcaaaggcagtgggtgattggttttatgatcgaaggcccttccgtgagatagattgtgcctacccttgcaaccctacttgccataatcgtatttttgatcagaatgagcgtccagacgtatagattcatttaaaagagtatgcttatttatttattactacaaactatactttattagttatctagtttttattgaacgagatgtgtcacttgcactcatggctttgtggtttgagatctcaaaccatcaaagtatgggttcgattgttgcatcaacaaaaaacaagctgtgattgatgatttaaaaggttccaaagtgtaagggtaggcaacctgataaaggatgataattgtctaccatgtaaacataacatttttattatcaataaagggtatatctgtaattctaataaaaaaaaaaaaaaaaaaaatttttggacgaaaatagtcttgtaggccga

SEQ ID NO: 364 - protein, 399 aa, Glycine max
MEITRIGQWLSLLICVLLLLQTEGVPVGITFVENAVAKGAVCLDGSPPAYHFHKGSGAGINNWIVHFEGGGWCNNVTTCLSRRDTRLGSSKKMDTSLSFSGFFSNSKKFNPDFYDWNRIKVRYCDGSSFTGDVEAVDPKTNLHFRGARVFAVVVEDLLAKGMKNAQNAIISGCSAGGLASILNCDRFKSLLPATTKVKCLADAGFFINVKDVSGAQRIEEFYSQVVQTHGSAKNLPTSCTSRLRPGLCFFPQNVVSQISTPIFFVNAAYDSWQIKNILAPGAADPRGQWRECKLDIKNCSPNQLSVMQGFRTDFLRAFSVVGNAASKGHFIDGCYAHCQTGIQETWLRNDSPVVAKTSIAKAVGDWFYDRRPFREIDCAYPCNPTCHNRIFDQNERPDV

SEQ ID NO: 365 - DNA, 1269 bp, Lotus japonicus
atggcgaggtttttctgggttggcattgcaatagcacttgttttagttagcaactgtgttgatgggtctgagggttacctacatcacttcaacgaaacggagctgtctttgttggaagcacatgaagcagcagcatcagccttatcattctccgggaggaataatcctctgcttgtaggcctcacccttattcaaaatgcagctgctaaaggagcagtctgcttggatggaacattgcctggttaccatttgcatcgtggatatggatcaggagcaaatagttggcttgttaacttagagggaggtggatggtacaataacattagaacgtgtgtttatcgtaagaaaacccggcgtggatcgtcggccttcatggaaaaggagataccctttacaggaatactgagtaacaaagctgaagaaaatccagattttttcaattggaacagagtaaagcttcgttattgtgatggcgcctcatttgctggggatgctgcacacccgactgcacaactgcaattcagaggtcaacgtatttgggcagctgcgatggaagacttgatgtcaaagggaatgcgttttgccaatcaggctcttctttcgggatgctctgcgggtggcctagctactattatacactgtgatgagttccgaggttactttccaaggactgctaaagtgaagtgtctaagtgatgctgggttgtttcttgatgcgattgacgtatctggtgggcgttctctcaggaacttatacagtggtgtcgtaggattgcagagagtgcagaagaatctaccacaaatttgtactaatcaccttgatcccacctcgtgcttcttccctcaaaacttgatttccagtgttagaaccccgctatttattcttaatgctgcttatgattcatggcagattcaatctagcttagctcctccaacagcagatcctcatggctattggcatgattgtagattaaaccatgctaaatgtagtagatcacaagtccaatttctgcaaggattcaggaatcgcatgctgaatgttattaaagacttctcgagatcaaaccggaatggattgtttataaattcatgttttgctcactgccaatccgaaagacaagacacatggttttctgacaattctcctgttatagggaacaaggcaattgcggtggctgttggagactggtattttgaccgagcaggtgttaaggcgattgattgtccttatccttgtgataagacatgccacaatctgatttttgcataa

SEQ ID NO: 366 - protein, 422 aa, Lotus japonicus
MARFFWVGIAIALVLVSNCVDGSEGYLHHFNETELSLLEAHEAAASALSFSGRNNPLLVGLTLIQNAAAKGAVCLDGTLPGYHLHRGYGSGANSWLVNLEGGGWYNNIRTCVYRKKTRRGSSAFMEKEIPFTGILSNKAEENPDFFNWNRVKLRYCDGASFAGDAAHPTAQLQFRGQRIWAAAMEDLMSKGMRFANQALLSGCSAGGLATIIHCDEFRGYFPRTAKVKCLSDAGLFLDAIDVSGGRSLRNLYSGVVGLQRVQKNLPQICTNHLDPTSCFFPQNLISSVRTPLFILNAAYDSWQIQSSLAPPTADPHGYWHDCRLNHAKCSRSQVQFLQGFRNRMLNVIKDFSRSNRNGLFINSCFAHCQSERQDTWFSDNSPVIGNKAIAVAVGDWYFDRAGVKAIDCPYPCDKTCHNLIFA

SEQ ID NO: 367 - DNA, 1200 bp, Lotus japonicus
atgggaagtgcaagactcacaatatggacaaatcttctagtgtgtgtactgctattgttgaagacagaaggaggtattgttccactcattcgtcttgagaaggcggtatcaaaaggagctgtttgtttagatggcactcctccagcttaccattttgatgaagggtctggagaaggagttaacaactggattgttttccttgaaggaggaggatggtgtaataatgtcactgattgccttttgcgtaaggacactcgtcgaggctcatctgaccaaatgactgagccacgtttctttaatggatttttaagtgaaaatcaaaagtttaatccagatttctacaattggaacagaatcttggttaggtactgtgatggtgcatcttttactggggatgtagaagaagttgatccggcgacaaatttgcacttcagaggagcaagggtgtttgtagctgtaatagaagaattacttgcaaaaggaatgcagaatgctgaaaatgctattctctctggatgttcagctggaggattggctactatattacaatgtgatcactttaaatcacttttacctgcagaagctaaagtgaaatgcgttccagatgctggttattttatcaatgtaaaggatacatcaggaacacaatacattgaagagtactacaatgaagttgttgcaacacatggctcagcaaagaatttgcctccatcctgcacttcaagacgcagtccagggctgtgctttttcccacaatatgtggcctcagaaatcagcacaccaatcttctatgtaaatgcagcctatgacacatggcagattcataatatcttcgcccgaggttctgcggatccccatggcatttggcataactgcaagcttgatataaacaactgctcacctgatcagctaactgcaatacaaggcttcagaacagaatttataaaggcgttgagtgtgacagaaaactccagatcagaaggaatgttcatagactcttgctatgtccactgccaaacagaaacacaggaatcatggttgtcaagtgattctccgcagcttgctaacacaaaacttggcaaagcagttggggactggttttatgagcgaagtccttttcaaaagatagattgcagtttcccttgcaaccctacttgtcgtaatcttgcatttgatcaacaagctcaccctggaatttaa

SEQ ID NO: 368 - protein, 399 aa, Lotus japonicus
MGSARLTIWTNLLVCVLLLLKTEGGIVPLIRLEKAVSKGAVCLDGTPPAYHFDEGSGEGVNNWIVFLEGGGWCNNVTDCLLRKDTRRGSSDQMTEPRFFNGFLSENQKFNPDFYNWNRILVRYCDGASFTGDVEEVDPATNLHFRGARVFVAVIEELLAKGMQNAENAILSGCSAGGLATILQCDHFKSLLPAEAKVKCVPDAGYFINVKDTSGTQYIEEYYNEVVATHGSAKNLPPSCTSRRSPGLCFFPQYVASEISTPIFYVNAAYDTWQIHNIFARGSADPHGIWHNCKLDINNCSPDQLTAIQGFRTEFIKALSVTENSRSEGMFIDSCYVHCQTETQESWLSSDSPQLANTKLGKAVGDWFYERSPFQKIDCSFPCNPTCRNLAFDQQAHPGI

SEQ ID NO: 369 - DNA, 1251 bp, Medicago truncatula
atggtgaaccttttctgggtttgcattgtaatagcacttgttttcaccaactgggttgatgcaaatgcatattatcacatcaatgaaattgaactctctatcttagaagctcatgaagcttcttctttttcttcacttgtggctcagcctcacatggttggaataacccttattcaacctgctgctgctaaaggagctgtctgcttggatggaacattgcctgcttatcattttgatcacggatacggatccggtgcaaacagctggcttgttaatttagagggaggtggttggtgtaataaccgtagaacttgcgtctatcgcaagacaacacggcgtggatcatcaaaattcatggaaaaagcgataccttttactggaatattaagcaataatgctcaagagaatccagatttttttaactggaacagagtgaaaattcgttactgtgatggtgcctcttttaccggggatagtgaagataaggctgcgcagttgcaattcagaggacagcgcatttggttggctgcagtggaggatttgatgtcaaaaggaatgcgttttgccaagcaggctcttctttctggatgctcagctggtggtcttgctactattttacactgcgatgaatttcgaggtcatttcccaaggactaccaaagtgaagtgcctcagtgatgctgggttatttcttaatgctgttgatgtagctggtgggcataccctcaggaattttttcaacggtgttgtcaccctacagggagcgcagaagaatcttccacgcgtttgtactaatcatcttgatcccacttcgtgcttctttcctgagaacttgattgccagtgtcagaaccccgctattcattcttaatactgcctatgactcgtggcagatccagtcaagcttagctccttcatcggccgatccccacggcaattggcgtgaatgcagattaaaccataataaatgttccggttcacaaatccaatttctgcaaggattcaggaatcacatggtgaatgttgtgagaggcttctcaagatcaagtcaaaatggattgttcataaattcatgctttgctcactgccaatctgagaggcaagacacatggtttgctgacaactctcctgtcataggaaacaaggcaattgctctggctgttggagactggtattttgaccgagccgcagttaaggacattgattgtccttacccttgtgataacacatgccaccatttggttttcagatga

SEQ ID NO: 370 - protein, 416 aa, Medicago truncatula
MVNLFWVCIVIALVFTNWVDANAYYHINEIELSILEAHEASSFSSLVAQPHMVGITLIQPAAAKGAVCLDGTLPAYHFDHGYGSGANSWLVNLEGGGWCNNRRTCVYRKTTRRGSSKFMEKAIPFTGILSNNAQENPDFFNWNRVKIRYCDGASFTGDSEDKAAQLQFRGQRIWLAAVEDLMSKGMRFAKQALLSGCSAGGLATILHCDEFRGHFPRTTKVKCLSDAGLFLNAVDVAGGHTLRNFFNGVVTLQGAQKNLPRVCTNHLDPTSCFFPENLIASVRTPLFILNTAYDSWQIQSSLAPSSADPHGNWRECRLNHNKCSGSQIQFLQGFRNHMVNVVRGFSRSSQNGLFINSCFAHCQSERQDTWFADNSPVIGNKAIALAVGDWYFDRAAVKDIDCPYPCDNTCHHLVFR

SEQ ID NO: 371 - DNA, 1248 bp, Medicago truncatula
atgattcataattcgttttctgttacgatgaacttcgcggtggcgtttgcattattctatctaatcacggtggagtcatggcgtgttcactcacaagaaccgaagaagctttatgtgaacatgactctcgttaacaacgcacgcgaaaccggtgctttttgtttggatggaagtttaccggcgtatcatttggatagaggatttggagctggtgaagacaattggcttctacaatttgagggaggtggttggtgcaatgacttgaaatcatgcttggagagagcaaaaactcgcaggggttcaacaaattacatgaccaaatatgagaccttcaatggtattttaagcaacaatgctaccgttaatccagacttttacaattggaacagggtgaagctgagatactgtgatggagcttcatttacgggaaacaaagtgttcaataatgggacaacaaagctttacttcaaagggcaaaagatttgggaagcccttattgccgaccttctgccaaaaggtttaggaaaggcacgcaaggctttgctttcaggctgctcagcaggaggtttggccacctttcaccattgtgacaatttcaccaagtatttgccaaccaatgccagtgttaaatgcttgagtgatgcaggttttttccttgatggaagagatgtcagtttgaaccacaccatgagatactttttcaaaagtgtagttaggttgcaggggtcagtacagaacttgaataaaaattgcaccagtgcgatgccttcttatccagacctatgcttctttccacaatatgtgttgaaatatatatcaacaccatattttatcttgaactctgcctatgatgtattccaattccataatatattggtgccaccttcaactgatccccgcgggcactggatccactgcaagaaggacccagcggcatgcacaccaaccgaaattaatacattgcaaggttttaggctcagcatgattgctgctttgaaacccttctacttttattcaaacagcgggggaatgtttataaattcatgttttgctcattgccaaagtgaatcacaagatacatggtctggagctgattctccaaaaataaaaaacacgactattgcagaagcagtcggtgattggtattttagtagaaacagaagcaaggcaatagactgtccatatccatgtgatacaacttgtcgtaatttgatacctgcacctgcattacataatttaataccttaa

SEQ ID NO: 372 - protein, 415 aa, Medicago truncatula
MIHNSFSVTMNFAVAFALFYLITVESWRVHSQEPKKLYVNMTLVNNARETGAFCLDGSLPAYHLDRGFGAGEDNWLLQFEGGGWCNDLKSCLERAKTRRGSTNYMTKYETFNGILSNNATVNPDFYNWNRVKLRYCDGASFTGNKVFNNGTTKLYFKGQKIWEALIADLLPKGLGKARKALLSGCSAGGLATFHHCDNFTKYLPTNASVKCLSDAGFFLDGRDVSLNHTMRYFFKSVVRLQGSVQNLNKNCTSAMPSYPDLCFFPQYVLKYISTPYFILNSAYDVFQFHNILVPPSTDPRGHWIHCKKDPAACTPTEINTLQGFRLSMIAALKPFYFYSNSGGMFINSCFAHCQSESQDTWSGADSPKIKNTTIAEAVGDWYFSRNRSKAIDCPYPCDTTCRNLIPAPALHNLIP

SEQ ID NO: 373 - DNA, 1248 bp, Medicago truncatula
atgagaagaatgaatattattctgataataataacagtaactttttcctcagttagatctcagacacaaaatctatctcctcggtatatcttggagaacgataacgatgtcgtttcagtttcatcctctcccctgctgcctcaacctctcatgatcccactcactcttattcatggagctgtttctaaaggagcagtatgtttggatggaactttacctggttaccacttccatcccggatctggatctggtgcaaatagttggctcattcaattggagggaggaggatggagtaataccatcagaagttgtgtctttagaaaaactactcgacgcggttcctcaaaatacatggaaaagcaactaccattcactggaatattgagcaataaagctgaacaaaatcctgatttctttaactggaacagagtcaaagtgcggtactgtgatggggcttctttcagtggagacagtcaaaacgaggctgcacagcttcaatttagaggacagaaaatatggctagctgcaatggaagaattaatgtccaggggaatgaagaacgccaaccaggctcttttatctggatgctctgcgggtggtctggcatctatactacattgcgatgagttccaaagcttgtttccaaaatctaccaaagtgaaatgtttgagtgatgcaggattttttcttgatgcaactgatgtatctggggggcacacattgaggaatctgtttggaggtgtagttaatttacaggaagtgcaaaaaaatctaccaaaaagttgtctcagccacctggacccaacttcgtgcttctttcctcaaaatttgatcgatcatgttcagactccattgtttctgctgaatgcagcttatgatgcatggcagttccaagaaagtctagctcctcattcagcagatcctcatggatcttggaataattgtaaatcaaatcatgcaaattgtaattcatcccaaattcagatcctccaaaacttcagaaatcaaatgctaaatgacatcaaaggattttcaacgacttctcaatctggattattcataaattcttgttttgctcattgccaatcggagagacaagatacatggtttgctgatgactctcccctccttaacaacttgccaattgcggttgccattggaaattggtttttcgatcgtcaagttgtcaaagctattgattgtgcttacccctgtgataatacctgccataatctggtcttcaagtga

SEQ ID NO: 374 - protein, 415 aa, Medicago truncatula
MRRMNIILIIITVTFSSVRSQTQNLSPRYILENDNDVVSVSSSPLLPQPLMIPLTLIHGAVSKGAVCLDGTLPGYHFHPGSGSGANSWLIQLEGGGWSNTIRSCVFRKTTRRGSSKYMEKQLPFTGILSNKAEQNPDFFNWNRVKVRYCDGASFSGDSQNEAAQLQFRGQKIWLAAMEELMSRGMKNANQALLSGCSAGGLASILHCDEFQSLFPKSTKVKCLSDAGFFLDATDVSGGHTLRNLFGGVVNLQEVQKNLPKSCLSHLDPTSCFFPQNLIDHVQTPLFLLNAAYDAWQFQESLAPHSADPHGSWNNCKSNHANCNSSQIQILQNFRNQMLNDIKGFSTTSQSGLFINSCFAHCQSERQDTWFADDSPLLNNLPIAVAIGNWFFDRQVVKAIDCAYPCDNTCHNLVFK

SEQ ID NO: 375 - DNA, 1185 bp, Lotus japonicus
atggagtgtccaagaatgggccaatggttaagccttctattatgtttactgctattactaaaggcagaaggagttgctgttccaaccacttttgttcaaagtgcggtcgcgaaaggagctgtttgtttagatgggagtccaccagcttaccattttcataagggatttggagcaggaattaacaactggattgttcactttgagggaggagcatggtgcaacaatgtcactacttgcctagctcgtagggacactcgtttaggttcatctaagaaaatgtcgcagaccctttccttttctgggtttttcagtaatgggcaaaagtttaatccagatttctacaattggaacagaatcaaggttaggtattgtgatgggtcatcatttactggtgatgttgaagctgttgatccaaaaaccaatttgcacttcagaggaggaaggatttttgttgctgtcgttgaggatttgctagcaaatggaatgaaaaatgctcaaaatgcaattctctctggatgttccgctggaggattgacctctattttacagtgcgatcgcttcagatctcttattcctgcagcagccaaagtgaaatgcctttcagatgctggttattttattaatctaaaggatgtgtctggagccgcacacatagaacagctttatagtcaagttgttgaaacccatggctctgcaaagaatttgcctgcatcctgcacctcaagactcagaccggggctgtgcttttttccccaaaatgtggcagggcaaatcaaaacaccaatctcctttgtcaatgcagcgtatgactcatatcaggttaagaacattttggctccaggtgttgctgatccccatggcacttggcgtgactgcaagcttgatataaaaaagtgctcttctaatcaattaactgtaatgcaaggtttcaggacagaattcttaaaggctataagtgtggttgagaactctccatctaaaggaatgttcgtagacggttgctattcccattgccaaactggaatgcaggagacatggatgagaagtgactctccagtgctggccaatacaacaattgcaaaggcagtgggagattggttttatgaacgaaggtctttcagtcagatagattgctcttacccttgcaaccctacttgtcacaaccgtgtttttgatgataattaa

SEQ ID NO: 376 - protein, 394 aa, Lotus japonicus
MECPRMGQWLSLLLCLLLLLKAEGVAVPTTFVQSAVAKGAVCLDGSPPAYHFHKGFGAGINNWIVHFEGGAWCNNVTTCLARRDTRLGSSKKMSQTLSFSGFFSNGQKFNPDFYNWNRIKVRYCDGSSFTGDVEAVDPKTNLHFRGGRIFVAVVEDLLANGMKNAQNAILSGCSAGGLTSILQCDRFRSLIPAAAKVKCLSDAGYFINLKDVSGAAHIEQLYSQVVETHGSAKNLPASCTSRLRPGLCFFPQNVAGQIKTPISFVNAAYDSYQVKNILAPGVADPHGTWRDCKLDIKKCSSNQLTVMQGFRTEFLKAISVVENSPSKGMFVDGCYSHCQTGMQETWMRSDSPVLANTTIAKAVGDWFYERRSFSQIDCSYPCNPTCHNRVFDDN

SEQ ID NO: 377 - DNA, 1266 bp, Medicago truncatula
atgtgtgaaacaaacaagagttttgtaagcatgaagctgctatttgtgtttggattcataggctttgtgattgtgaaaggtgtggatgtggaactgaaaggtttagagaatggtaatgtgacagacatgcaatatgtcagaggaggaggtttcaactatagacctttgatggttggtcttactcttatcaatggagctgctgctaaaggagctgtctgccttgatggatctttaccggcttaccacttccatcgtggatacggttcaggttcaaacagttggctaatacatttggagggaggaggctggtgtggaactgtgagaaattgtatttacagtaagaaaacgcgacatggttcatcatattttatggaaaaacaaataccatttattggaatattgagcaacaaagctgcggaaaatccagattttttcaattggaatagagtaaaaattcgttattgtgatggcgcatcgtttagtggggacagtcaaaatgaggcagcaaggttgtatttccgagggcagcgcatatggcaagctgcaatggaagatttaatgtcgaaagggatgcgctatgccaaacaggctcttctatctggatgttctgcaggaggtttatcagctatactacattgcgatgaatttcgggaattgtttccaagaacaactagagtaaagtgctttagtgatgccggattattccttgactctgttgatgtatctggccgtcgcagtttaaggaatttgtttggcagtgtagtgactttacagggtgcgcataagagccttccaagaagttgtaccaatcacctcaatccaattttgtgctttttccctcagcatttaattgcaagtgtaaggacgccactatttcttctcaatgcagcttatgatacttggcagattcaagccagtctagctccaccatctgctgactaccattggaattggtatgactgccgaaaaaattatgcacgctgtagttcaccacagatacaatatctacaaggttttcgaaatcagatgcttagagttacaagacgcttctcaaggtcccgccaaaacgggttattcattaattcgtgttttgctcactgccaatctgaaagacaggatacatggcatgcacgcggttctcctcatattggaaataaagggatcgcagattctgtcgggaacaggttttttgaccgagttggtgtccaagctattgggtgtccttacccttgtgacaaaacatgccataatttggttttcaactga

SEQ ID NO: 378 - protein, 421 aa, Medicago truncatula
MCETNKSFVSMKLLFVFGFIGFVIVKGVDVELKGLENGNVTDMQYVRGGGFNYRPLMVGLTLINGAAAKGAVCLDGSLPAYHFHRGYGSGSNSWLIHLEGGGWCGTVRNCIYSKKTRHGSSYFMEKQIPFIGILSNKAAENPDFFNWNRVKIRYCDGASFSGDSQNEAARLYFRGQRIWQAAMEDLMSKGMRYAKQALLSGCSAGGLSAILHCDEFRELFPRTTRVKCFSDAGLFLDSVDVSGRRSLRNLFGSVVTLQGAHKSLPRSCTNHLNPILCFFPQHLIASVRTPLFLLNAAYDTWQIQASLAPPSADYHWNWYDCRKNYARCSSPQIQYLQGFRNQMLRVTRRFSRSRQNGLFINSCFAHCQSERQDTWHARGSPHIGNKGIADSVGNRFFDRVGVQAIGCPYPCDKTCHNLVFN

SEQ ID NO: 379 - DNA, 1269 bp, Arabidopsis thaliana
atgaggaagcttttcttgttagggtttatagttgcaggactggttcttgggaatgaggcaaatgggtatttagagttcaatgtcactgaattagatcgcattgaggatttagagtttggtttctccaaatttagttccaatttcaatccattaatggttggtctcacacttatcagaggagctggttctaaaggagctgtttgtttggatggtacattgcctggatatcacttacatcgtggacatggatctggagccaatagctggttaattcaattagagggaggaggatggtgtgacaacattaggaactgtgtataccgaaagaagtcgcgtcgcggatcttctaactatatggagaaacaaatacagtttacaggaatacttagcaataaagctcaagaaaatccagactttttcaactggaatcgagttaagcttcgttactgcgatggtggttccttcagtggagatagtcagaacaaggctgcacggcttcagtttagaggagagaagatatggagagccgcaatggacgatttgaaggcaaagggaatgcgaaatgcgaaacaggcacttctatctggttgctctgcaggtggtctagcagttattttacgctgtgacgaattcagaaacttgttttctggatggaccagagttaaatgcttaagtgatgcaggcttgttcttggacaccttagtatcggttattgaaccgcgcttgttttacgtgtttaaaggcctgatgtatccgggagtgaagaacaatttgccacatttatgcactaaccatctcaatccaacctctgtaagctcttctttacttagttgtttcttccctcaaaacttgatcagtcagatgaaaactcctcttttcattgtcaatgcagcatatgatatttggcagattcaaagcagtatcgctccgccgagtgcagatcctagtggttattggcatgaatgcagattaaaccacggtagatgcactccggcgcagatacggttcttgcaagggtttagaaaccaaatgttgagagctgtgagtggtttctcgaattcgaaaaagaacggtttgttcatcaattcttgctttgctcattgccaaaccgaaaggcaagacacttggttcgccgatgattctcctgttatacacaaaaaggcggtggcgatagcggttggagattggtatttcgatagagctgaagtgaagctaatagattgtccatacccgtgtgataggagctgtcacaatctggtcttcagatga

SEQ ID NO: 380 - protein, 422 aa, Arabidopsis thaliana
MRKLFLLGFIVAGLVLGNEANGYLEFNVTELDRIEDLEFGFSKFSSNFNPLMVGLTLIRGAGSKGAVCLDGTLPGYHLHRGHGSGANSWLIQLEGGGWCDNIRNCVYRKKSRRGSSNYMEKQIQFTGILSNKAQENPDFFNWNRVKLRYCDGGSFSGDSQNKAARLQFRGEKIWRAAMDDLKAKGMRNAKQALLSGCSAGGLAVILRCDEFRNLFSGWTRVKCLSDAGLFLDTLVSVIEPRLFYVFKGLMYPGVKNNLPHLCTNHLNPTSVSSSLLSCFFPQNLISQMKTPLFIVNAAYDIWQIQSSIAPPSADPSGYWHECRLNHGRCTPAQIRFLQGFRNQMLRAVSGFSNSKKNGLFINSCFAHCQTERQDTWFADDSPVIHKKAVAIAVGDWYFDRAEVKLIDCPYPCDRSCHNLVFR

SEQ ID NO: 381 - DNA, 1092 bp, Arabidopsis thaliana
atgaaaaccttcaacgagtccaatggaacaaatgcaaatgtcctgatggtaggactcacgctcgtccaagccgctgctgctaaaggagcggtgtgtctggatgggtcagtgcctggatatcatttgtgtcgcgggtatggttcaggagcaaacaactggatcattcagttgcagggaggtgcatggtgtgacagcatacaaaactgtcagagccgtaaagggagtggttatggatcatctaccttaatggagaaagagttggcatttttaggattactaagcaataaagccgctgaaaatccagacttttacaattggaacaaagtaaaagtccggtattgtgatggtgcatcctttgatggtgacagcgaaaacaaggcggcacaacttcagtatagaggaaagcgtatatttttagctgtcatggaagatttgatggaaaagggaatgcgtcaggcaaaacaggctttgctcagcggatgttcttctgggggtctttctgccattttacgatgcgatgatttcaataacttgtttcctcctaccaccacagtaaaatgcatgagcgatgctggcttcttcctcgacgccgttgatgtatctggaggtcattctttaaggcgtatgtattctggtgttgtgaacactcagggtttgcaaaacacacttcctcccacttgtacaagccatatcaaaccatttttgtgttttttccctcaatacataatcaaccaagtcaagaccccgttgtttattctcaactcgggatttgattcgtggcagattggaaatagtttagccccaccatctgctgataagagtggcagttggcataactgcagttttagctttaggtgcactgcctctcagatgcacttcttagaaggtttcaagatgagcatgttagatgcgttgaagaccttttcgaagtttagcaagaatggagttttaattacctcgggatgggctcattgtcaagcggagagacaagatacttggtttcctggatactctggagcgggcaaagctaaggggattgctgtggctgttggagattggtatttcgaaagaacaaaacagaatagctcatag

SEQ ID NO: 382 - protein, 363 aa, Arabidopsis thaliana
MKTFNESNGTNANVLMVGLTLVQAAAAKGAVCLDGSVPGYHLCRGYGSGANNWIIQLQGGAWCDSIQNCQSRKGSGYGSSTLMEKELAFLGLLSNKAAENPDFYNWNKVKVRYCDGASFDGDSENKAAQLQYRGKRIFLAVMEDLMEKGMRQAKQALLSGCSSGGLSAILRCDDFNNLFPPTTTVKCMSDAGFFLDAVDVSGGHSLRRMYSGVVNTQGLQNTLPPTCTSHIKPFLCFFPQYIINQVKTPLFILNSGFDSWQIGNSLAPPSADKSGSWHNCSFSFRCTASQMHFLEGFKMSMLDALKTFSKFSKNGVLITSGWAHCQAERQDTWFPGYSGAGKAKGIAVAVGDWYFERTKQNSS

SEQ ID NO: 383 - DNA, 1191 bp, Oryza sativa
atggctgcttcgtccggcgaatggctgagccgggcagctatggtgttggtgctaggtctcgtggtggcgtcgtcagctaaggcgggcgatgtggacatggtgttcctgaagagtgcagtgagcacgggagcagtttgcctggatgggagcccaccggtttaccacttctctcctggttctggctctggtgccaacaactggctggttcatatggagggaggaggttggtgcaggaatgcccaagagtgttctgtcaggcagggtaacttcaggggctcttccaaatttatgaggccactatcgttttcagggataataggtggcaaccagagaaacaatcctgatttctataactggaacaggataaaggtcagatattgtgatggctcatcatttactggcgacgttgaaacagtagaaacttcgacgaacctccatttcagaggggccagagtttggaatgccatcattgaagatctactagcaaaggggatgagcaaagcacaaaatgctcttctttctggttgttcggctggaggtctggctgccatactgcactgtgaccaattccgagatctgcttccagcaactgcaaatgtgaagtgcttttctgatgctggtttttttgttgatggaaaggatatcaccgggaatgattttgtcagaacattctacaaggatgtcgtaaatctacatggatcggctaaaaatttaccatcttcatgtacgtcaaagatgtcccctgatctgtgtttcttcccgcagaatgtagtgccaacattgcgcacaccgttgttcatacttaatgcagcatatgatgcatggcagatcaagaacgtcctagcacctagtgccgctgacaaaaagaagacttgggccaaatgcaagcttgatataacagcttgctcctcaagccagctcacaaccttgcaaaatttcaggacagattttctggcagctcttcctaaaccagagcagtccccagccaatttgagcatattcatagactcatgctatgcccactgccaatctgggtcccaggatacatggctcgctcaaggttctcctgtagttgagaagacgcaaattggtaaagcagtaggagactggttccacgatcgggaagtatcccggaggattgattgcccttatccctgcaacccaacctgcaagaaccgtgatgatgattaa

SEQ ID NO: 384 - protein, 396 aa, Oryza sativa
MAASSGEWLSRAAMVLVLGLVVASSAKAGDVDMVFLKSAVSTGAVCLDGSPPVYHFSPGSGSGANNWLVHMEGGGWCRNAQECSVRQGNFRGSSKFMRPLSFSGIIGGNQRNNPDFYNWNRIKVRYCDGSSFTGDVETVETSTNLHFRGARVWNAIIEDLLAKGMSKAQNALLSGCSAGGLAAILHCDQFRDLLPATANVKCFSDAGFFVDGKDITGNDFVRTFYKDVVNLHGSAKNLPSSCTSKMSPDLCFFPQNVVPTLRTPLFILNAAYDAWQIKNVLAPSAADKKKTWAKCKLDITACSSSQLTTLQNFRTDFLAALPKPEQSPANLSIFIDSCYAHCQSGSQDTWLAQGSPVVEKTQIGKAVGDWFHDREVSRRIDCPYPCNPTCKNRDDD

SEQ ID NO: 385 - DNA, 1200 bp, Vigna radiata var. radiata
atggagaccagtagaaagggccaatggttaagtgtgctgatatgtgtggtactattactaaaggcagaaggagttcctgtgggaatcacttttgttgaaaatgcagtggcaaaaggagctgtttgtttggatgggagtccaccagcttaccacttccataagggatctggagcagggattaacaactggattgttcactttgagggtggaggatggtgcaacaacgttacttcttgcctttctcgtagggacactcgattaggctcatctaaaaaaatggatacccaactttccttttctggattttttagtaacagtaaaaagttcaatccagatttctacgattggaacagaatcaaggttaggtattgtgatgggtcatcatttactggtgatgttgaagctgttgatccagcaaccaatttgcacttcagaggatcaagggtttttgctgctgttgttgatgatttactagcaaaaggaatgaaaaatgctcaaaatgcaattatctctggatgttctgctggagggttggccgcaattttaaactgtgatcgattcaaatcactactacctagaacaactaaagtgaaatgccttgcagatgctggttattttatcaatgtaaaggatgtctctggggcacagcgcattgaagagttctacagtcaagttgttcaaacacatggctcagctaagaatttgcctgcatcctgcacttcaagactcagaccagggctgtgctttttcccacaaaatgtggtatcacaaatcagtacgccaatcttcttcgtaaatgcagcctatgattcatggcagatcaaaaacattttggcaccaggtgctgctgatccccatggcacctggcgtgaatgcaagcttgatataaaaaaatgctcatcaaatcaactcagtgcaatgcaagtattcaggactgatttcctgagggcatttggtgctgtggggaactctccatcaaaagggcatttcatagatggttgctatgctcactgccaaactggaacacaagagacatggttgagaaatgactctcctgtgttaggcagcacaacaattgcgaaggcagttggagactggtattatgatcgaaagccatttaagcagatagattgtgcctacccttgcaaccccacttgccacaatcgtatttttgatcagaatgagcgtccagacgtatag

SEQ ID NO: 386 - protein, 399 aa, Vigna radiata var. radiata
METSRKGQWLSVLICVVLLLKAEGVPVGITFVENAVAKGAVCLDGSPPAYHFHKGSGAGINNWIVHFEGGGWCNNVTSCLSRRDTRLGSSKKMDTQLSFSGFFSNSKKFNPDFYDWNRIKVRYCDGSSFTGDVEAVDPATNLHFRGSRVFAAVVDDLLAKGMKNAQNAIISGCSAGGLAAILNCDRFKSLLPRTTKVKCLADAGYFINVKDVSGAQRIEEFYSQVVQTHGSAKNLPASCTSRLRPGLCFFPQNVVSQISTPIFFVNAAYDSWQIKNILAPGAADPHGTWRECKLDIKKCSSNQLSAMQVFRTDFLRAFGAVGNSPSKGHFIDGCYAHCQTGTQETWLRNDSPVLGSTTIAKAVGDWYYDRKPFKQIDCAYPCNPTCHNRIFDQNERPDV

SEQ ID NO: 387 - DNA, 858 bp, Arabidopsis thaliana
atggggaggcttaagcaatgttggtcaagtctgctagtattggcagtgttggtgatcggaactggagccgttcccatcacttatctccaaagcgccgtcgctaaaggagccgtgtgtttggatgggagtgcaccagcttaccattttgacaaagggtttggttcgggtgttaacaattggatcgtccacatggagggaggaggatggtgtaccgacgttgcttcatgtaatgaacgtaagggtacaatgaagggttcttccaaattcatgaacaaagactttggattttccggtatcttgggtggcaagcaaagcactaacccagatttctacaattggaacagaatcaaagtacgatattgtgacggatcatcctttaccggcaatgtagaagccgttaatccggcaaacaagctgttcttccgcggtgcccgagtttggcgtgcggtggttgatgatcttatggctaaaggaatgaaaaacgctcaaaacgctatactctccggttgttcagctggagcattggctgcgattcttcattgtgacactttccgtgccatacttccccgaacagctagcgtcaaatgtgtttctgatgccggttactttatccacggtaaagatatcacaggaggatcatacattcaatcatattacagcaaagtcgtcgcactccacggatctgcaaagagtcttcctgtttcttgtacctcaaaaatgaaaccagaactctgtttcttcccgcaatacgtcgttccttccatgcgaacaccgctctttgtcatcaatgccgcttttgattcttggcagatcaagaacgttttggctccaactgctgttgataagggaaaagagtga

SEQ ID NO: 388 - protein, 285 aa, Arabidopsis thaliana
MGRLKQCWSSLLVLAVLVIGTGAVPITYLQSAVAKGAVCLDGSAPAYHFDKGFGSGVNNWIVHMEGGGWCTDVASCNERKGTMKGSSKFMNKDFGFSGILGGKQSTNPDFYNWNRIKVRYCDGSSFTGNVEAVNPANKLFFRGARVWRAVVDDLMAKGMKNAQNAILSGCSAGALAAILHCDTFRAILPRTASVKCVSDAGYFIHGKDITGGSYIQSYYSKVVALHGSAKSLPVSCTSKMKPELCFFPQYVVPSMRTPLFVINAAFDSWQIKNVLAPTAVDKGKE

SEQ ID NO: 389 - DNA, 1203 bp, Oryza sativa subsp. japonica
atgccgatcctcccgcgtcgtcgatatgcggagcccttgctgctcctgctcctggcagccgttgcccgctcaacggcagcggcaccggacgtcgtcgagctgatcctcctcaccggcgctcaggagaagggcgcagtgtgcttggatgggagcccaccgggctatcacctgcagagaggctttggctccggtgaacacagctggctcatctatcttgagggaggagaatggtgcgacaccatcgaaagctgttccaaccgtaaaacgaccgagcttggttcatccaaattgatggaagcgcaagagttcgaggggatactcagcaataaccaaacagtgaattctgatttttacaactggaacaaagttgtcataaggtattgcgatggagcatcgttttcagggaatgcggaggctcaagatcaggatgggagcacgctccacttcagaggattgcgcatctggcaagcagttcttgatgagctcatggaaaaaggacttgcgagtgctaaacaggccttactttctggatgctccgctggtggtctagctacactactgcactgcaatgattttcatgcacgatttcctaaggaggtttcagctaaatgccttcctgatgctggaattttccttgatattttatgctccagtgaggatttatctgggaagaggctcatgtggtccgttttcaatggaactgttcagcttcagaatgttagtgaagttttgccaaaggattgtcttgcaaagaaggttcgaacagagtgcttcttggccactgagcttgtcaagagcatcaccgctcccacgcttattgtgaactctgcctatgattcttggcagataagagatactcttgccccagtgggatcctatcctggacaatcatggttgaattgcacaaatgacattggaaattgcaattccacacaaatggaagtactcaatgggttcaggaagaaatttgtcgatggcgtaaaggttgtcaaagacaaaaaggactggggtctgttcattgattcatgcttcatgcactgtcaaacaaaatacagcatctcatggagctcacagttttccccagtacttggtaacatgactatcgccaaggctgttggggattggtattttgagagaagcaaaacagtgaaagagattgactgcgagtatccatgtaatcccacatgtaaacttacgggataa

SEQ ID NO: 390 - protein, 400 aa, Oryza sativa subsp. japonica
MPILPRRRYAEPLLLLLLAAVARSTAAAPDVVELILLTGAQEKGAVCLDGSPPGYHLQRGFGSGEHSWLIYLEGGEWCDTIESCSNRKTTELGSSKLMEAQEFEGILSNNQTVNSDFYNWNKVVIRYCDGASFSGNAEAQDQDGSTLHFRGLRIWQAVLDELMEKGLASAKQALLSGCSAGGLATLLHCNDFHARFPKEVSAKCLPDAGIFLDILCSSEDLSGKRLMWSVFNGTVQLQNVSEVLPKDCLAKKVRTECFLATELVKSITAPTLIVNSAYDSWQIRDTLAPVGSYPGQSWLNCTNDIGNCNSTQMEVLNGFRKKFVDGVKVVKDKKDWGLFIDSCFMHCQTKYSISWSSQFSPVLGNMTIAKAVGDWYFERSKTVKEIDCEYPCNPTCKLTG

SEQ ID NO: 391 - DNA, 1248 bp, Oryza sativa subsp. japonica
atggcgaccagcagcaagctccggtcgccggtgctcccgcgccgtcgacttgcggagcccttccttctgctgctcctgctcctgctcctggccgccgtagcccgcccaacggcggcggcggacgtcgtcgagctgaccctcctcgccggcgctcaggagaagggcgcagtgtgcttggatgggagcccgccggggtaccacctgcagagaggcttcggctccggtgagcacagctggctcgtctttcttgagggaggagcctggtgcaacagcatcgaaagttgttccaggcgcaaaatgggcgtgtatggttcatccaaattcatgaaagcagcagagttcaatggaatactcagcaatgaccaacaactgaattctgatttttataactggaacaaagttgccataaggtattgcgatggggcatcgttttctggtgatgcggaggcccaagataaggatgggagcacacttcatttcaggggattgcgcatctgggaagcagttgttgatgagctcatgggaaaaggactcgcaactgctaaacaggccatactttcaggatgctctgctggtggtctggctgcactactgcactgcaatgattttcatgcacgatttccaaaggaggtttcagctaaatgccttcctgatgctggatttttccttgatgttgaggatttatctggcgagaggcacatgtggtccgtattcaatggaactgttcatcttcagaatgttagagaagttttgtcaaaagattgtcttacaaagaaggatccaacagagtgcttctttcctgctgagcttgttaagagcatcaccgctcccacgcttattctgaactctgcttatgattcttggcagataaggaatgcccttgctccagatggatcctttcctggacagtcatggtccagttgcaaaactgacattcggaattgcagttccacacaaatccaagtattcaatggattcaggaacaaatttgtcgatgatgtagagattgtcaaagacaaaaaggactggggactgttcattgattcatgcttcacccactgtcaaacgccattcaacatctcatggagctcacaggcctccccagtgctcggtagcaagactgttgccgaggctgttggggattggtatttcgagagaagctatgaagtgaaagagatcgactgcgagtatccttgcttacttgatgaagcagcagctgcagatcacctttcaccatttgttctatga

SEQ ID NO: 392 - protein, 415 aa, Oryza sativa subsp. japonica
MATSSKLRSPVLPRRRLAEPFLLLLLLLLLAAVARPTAAADVVELTLLAGAQEKGAVCLDGSPPGYHLQRGFGSGEHSWLVFLEGGAWCNSIESCSRRKMGVYGSSKFMKAAEFNGILSNDQQLNSDFYNWNKVAIRYCDGASFSGDAEAQDKDGSTLHFRGLRIWEAVVDELMGKGLATAKQAILSGCSAGGLAALLHCNDFHARFPKEVSAKCLPDAGFFLDVEDLSGERHMWSVFNGTVHLQNVREVLSKDCLTKKDPTECFFPAELVKSITAPTLILNSAYDSWQIRNALAPDGSFPGQSWSSCKTDIRNCSSTQIQVFNGFRNKFVDDVEIVKDKKDWGLFIDSCFTHCQTPFNISWSSQASPVLGSKTVAEAVGDWYFERSYEVKEIDCEYPCLLDEAAAADHLSPFVL

SEQ ID NO: 393 - DNA, 1272 bp, Arabidopsis thaliana
atgatcaagaagtgtaaaatgaagaagcttctatggagttggatcattctcttcaacatccatgtaaatggaatgatgatggagtttgatgaaatggagtggttcacagttttcaatggaacaaaagtgtttcagactcaaaatgatgttttttctgaagctaagtttcctatggttggactcactctgattcaatctgctgctgctaaaggagctgtgtgtttggatggaagtcttcccggataccatttgcatcgcgggtttggttccggagcgaacaattggctcgttcaattagagggaggtggatggtgtgataccattagaaattgtgtttaccgtaaaaccactcgtcgtggatcttcttcatatatggagaaagagataccatttaccggcattctaagtgataaagccgcggataatccagacttttataactggaatagagtaaaagttcggtattgtgacggtggatcgtttagcggggatagcgaaaataaggctgcacaacttcagtttagaggaaagagaatttggttagctgctatggaagatttgatggcaaaaggtatgcgtcaagctaagcaggctctgctctctggatgttctgcaggaggtcttgcggtgattttacgatgtgatgattttgggaaattgtttcctccttccaccagagtgaaatgtttgagtgatgctggtttcttccttggtgccatcgatgtgtctggaggtcgatctcttagacgattatacgccggtgtggtcagattacagaatctgcaaaccaaccttcctcagtattgtgtaaaccgtcttaatcccacttcgtgttttttcccacaaaacctaatcaaccaagtcaagactccactttttattcttaatgctgcatatgattcttggcagattcaagagagtttagctccaaaatctgcagatccaagtggaagttggaatgattgtagacttaactacgccaagtgtagtgcatctcagatccaattcttgcaaggttttaggacgcgtatggtgaatttggtaaaaggtttcgcgatgccaagtaagaacggtgtgttcctcaattcgtgctttgctcattgccaaacagagaggcatgacacttggttcgcccaaaactctccagctattaagaacaagggtattgcagtagctgtgggagattggtatttcgaaagaggaggagcaaagctcatagactgtgcttatccttgtgacaagacttgtcacaatttggtctttagaagataa

SEQ ID NO: 394 - protein, 423 aa, Arabidopsis thaliana
MIKKCKMKKLLWSWIILFNIHVNGMMMEFDEMEWFTVFNGTKVFQTQNDVFSEAKFPMVGLTLIQSAAAKGAVCLDGSLPGYHLHRGFGSGANNWLVQLEGGGWCDTIRNCVYRKTTRRGSSSYMEKEIPFTGILSDKAADNPDFYNWNRVKVRYCDGGSFSGDSENKAAQLQFRGKRIWLAAMEDLMAKGMRQAKQALLSGCSAGGLAVILRCDDFGKLFPPSTRVKCLSDAGFFLGAIDVSGGRSLRRLYAGVVRLQNLQTNLPQYCVNRLNPTSCFFPQNLINQVKTPLFILNAAYDSWQIQESLAPKSADPSGSWNDCRLNYAKCSASQIQFLQGFRTRMVNLVKGFAMPSKNGVFLNSCFAHCQTERHDTWFAQNSPAIKNKGIAVAVGDWYFERGGAKLIDCAYPCDKTCHNLVFRR

SEQ ID NO: 395 - DNA, 1176 bp, Arabidopsis thaliana
atgaccaggttaaaacaaatgtggtcaagcattttagtgctagccgtggtggtgatcggagccagagctgttcccatcacgtatcttgaatctgcagtggctaaaggagctgtgtgtttggatggtagcgcgccagcataccatttcgataagggatctggctcaggagtgaacaattggatcgttcatatggaaggaggaggatggtgcactgatatagctacatgcgttcaacgtaaaagtacaatgaagggttcttctaagcttatgaacaaagactttggtttctccggtatcttgggtggcaagcaaagcaccaatccagacttttacaattggaatagaatcaaagttcggtattgcgatggttcatctttcaccggtgatatagaagctgttgatccggcgaacaagctgttctttcgcggtgctagggtttggcgtgcggtgatcgatgatcttatggctaagggaatgagcaacgctcaaaacgctatactctctggttgttcagctggagcattggctgcgattctacattgcgaccagttcaagtccactctccctaaaacggctaaggtcaaatgtgtatctgacgccggttacttcatccacggtaaggatatcactggaggatcttacatccaatcctactacgccaaagtcgtagcgacccacggatctgcaaagagtctacctgcttcttgcacctcaagtatgaagcctgaattgtgtttcttccctcaatacgttgctaagaccttacaaacaccgcttttcgtcatcaatgccgccttcgattcttggcagatcaagaatgtattggcaccaacctctgttgataaaagcaaagcgtggaagacttgtaagcttgatcttaagaagtgtacggccgctcagcttcaaaccgttcaaggatatagagaccaagtgttggctgcgttggcacctgttcaatccgcgacgacgaacggattgttcttggactcgtgccatgctcattgccaaggtggaagcgctgccacttggtcaggcgacaaaggtcccacagtcgcgaatacgaaaatggctaaggcggttggagattggttctttgagaggagtacgtttcagaacgtagattgttcatcgctgaattgcaaccctacttgccctgcagtatctactgaagactaa

SEQ ID NO: 396 - protein, 391 aa, Arabidopsis thaliana
MTRLKQMWSSILVLAVVVIGARAVPITYLESAVAKGAVCLDGSAPAYHFDKGSGSGVNNWIVHMEGGGWCTDIATCVQRKSTMKGSSKLMNKDFGFSGILGGKQSTNPDFYNWNRIKVRYCDGSSFTGDIEAVDPANKLFFRGARVWRAVIDDLMAKGMSNAQNAILSGCSAGALAAILHCDQFKSTLPKTAKVKCVSDAGYFIHGKDITGGSYIQSYYAKVVATHGSAKSLPASCTSSMKPELCFFPQYVAKTLQTPLFVINAAFDSWQIKNVLAPTSVDKSKAWKTCKLDLKKCTAAQLQTVQGYRDQVLAALAPVQSATTNGLFLDSCHAHCQGGSAATWSGDKGPTVANTKMAKAVGDWFFERSTFQNVDCSSLNCNPTCPAVSTED

SEQ ID NO: 397 - DNA, 1254 bp, Arabidopsis thaliana
atgaagaagcttctatggagttggatcattctcttcaacatccatgtaaatggaatgatgatggagtttgatgaaatggagtggttcacagttttcaatggaacaaaagtgtttcagactcaaaatgatgttttttctgaagctaagtttcctatggttggactcactctgattcaatctgctgctgctaaaggagctgtgtgtttggatggaagtcttcccggataccatttgcatcgcgggtttggttccggagcgaacaattggctcgttcaattagagggaggtggatggtgtgataccattagaaattgtgtttaccgtaaaaccactcgtcgtggatcttcttcatatatggagaaagagataccatttaccggcattctaagtgataaagccgcggataatccagacttttataactggaatagagtaaaagttcggtattgtgacggtggatcgtttagcggggatagcgaaaataaggctgcacaacttcagtttagaggaaagagaatttggttagctgctatggaagatttgatggcaaaaggtatgcgtcaagctaagcaggctctgctctctggatgttctgcaggaggtcttgcggtgattttacgatgtgatgattttgggaaattgtttcctccttccaccagagtgaaatgtttgagtgatgctggtttcttccttgatgccatcgatgtgtctggaggtcgatctcttagacgattatacgccggtgtggtcagattacagaatctgcaaaccaaccttcctcagtattgtgtaaaccgtcttaatcccacttcgtgttttttcccacaaaacctaatcaaccaagtcaagactccactttttattcttaatgctgcatatgattcttggcagattcaagagagtttagctccaaaatctgcagatccaagtggaagttggaatgattgtagacttaactacgccaagtgtagtgcatctcagatccaattcttgcaaggttttaggacgcgtatggtgaatttggtaaaaggtttcgcgatgccaagtaagaacggtgtgttcctcaattcgtgctttgctcattgccaaacagagaggcatgacacttggttcgcccaaaactctccagctattaagaacaagggtattgcagtagctgtgggagattggtatttcgaaagaggaggagcaaagctcatagactgtgcttatccttgtgacaagacttgtcacaatttggtctttagaagataa

SEQ ID NO: 398 - protein, 417 aa, Arabidopsis thaliana
MKKLLWSWIILFNIHVNGMMMEFDEMEWFTVFNGTKVFQTQNDVFSEAKFPMVGLTLIQSAAAKGAVCLDGSLPGYHLHRGFGSGANNWLVQLEGGGWCDTIRNCVYRKTTRRGSSSYMEKEIPFTGILSDKAADNPDFYNWNRVKVRYCDGGSFSGDSENKAAQLQFRGKRIWLAAMEDLMAKGMRQAKQALLSGCSAGGLAVILRCDDFGKLFPPSTRVKCLSDAGFFLDAIDVSGGRSLRRLYAGVVRLQNLQTNLPQYCVNRLNPTSCFFPQNLINQVKTPLFILNAAYDSWQIQESLAPKSADPSGSWNDCRLNYAKCSASQIQFLQGFRTRMVNLVKGFAMPSKNGVFLNSCFAHCQTERHDTWFAQNSPAIKNKGIAVAVGDWYFERGGAKLIDCAYPCDKTCHNLVFRR

SEQ ID NO: 399 - DNA, 1176 bp, Brassica napus
atggggaagcttaagcaatgttggtcaagtgtgctagtgttgtccatggtggtgatcggaacaggagccgtccccatcacttatctacaaagcgccgtagcaaaaggagccgtgtgtttggatggaagtgcaccagcttaccatttcgacaaagggtttggttcgggagttaacaactggattgttcacatggagggaggaggatggtgtaccgatgtggcttcatgtattaagcgtaagggtacaatgaagggttcgtccaaattcatgaacaaagactttggtttctccggtatcttgggtggcaagcaaaacactaacccagatttttacaattggaatagaatcaaagtacgttattgtgacggatcatctttcaccggcaatgtagaagctgttaatccggcgaataagctgttcttccgcggtgcacgagtttggcgtgcggtgatcgatgatctcatggctaaagggatgaaaaacgctcaaaatgcgatactctccggttgttcagccggagcattggcagctattctacattgtgacactttccgcgctattcttcctcggaccgctagagtcaaatgtgtttccgacgctggttactttattcacggcaaagatatctcaggaggatcatacatacaatcttattacagcaaagttgtcgcactccacggatctgcaaagagtcttcctgtttcatgcacctcaaaaatgaaaccagaactttgtttcttcccgcaatatgtcgtcccttccatgcgaacaccgctctttgtcattaacgctgcctttgactcctggcagatcaagaacgttttggctccgaccggagtagataagcgcaaagaatgggcgaactgtaagctcgatctcaagaaatgttcggccgctcagctcaaaacagtccaagggtttagagatcagatgatgcgtgcattgtctccgatccacagtactccgtcgagaggattgttcttggactcgtgtcacgctcattgccaaggaggaagcgccgcctcttggtccggcgccaaaggtccccaagtcgccaacacgaaaatatcgaaagcagttggaaactggttttacggtcggagtgcattccagaagatagactgcccttcgccgatttgcaatcctacttgtcctgcgatctctactgacgagtag

SEQ ID NO: 400 - protein, 391 aa, Brassica napus
MGKLKQCWSSVLVLSMVVIGTGAVPITYLQSAVAKGAVCLDGSAPAYHFDKGFGSGVNNWIVHMEGGGWCTDVASCIKRKGTMKGSSKFMNKDFGFSGILGGKQNTNPDFYNWNRIKVRYCDGSSFTGNVEAVNPANKLFFRGARVWRAVIDDLMAKGMKNAQNAILSGCSAGALAAILHCDTFRAILPRTARVKCVSDAGYFIHGKDISGGSYIQSYYSKVVALHGSAKSLPVSCTSKMKPELCFFPQYVVPSMRTPLFVINAAFDSWQIKNVLAPTGVDKRKEWANCKLDLKKCSAAQLKTVQGFRDQMMRALSPIHSTPSRGLFLDSCHAHCQGGSAASWSGAKGPQVANTKISKAVGNWFYGRSAFQKIDCPSPICNPTCPAISTDE

SEQ ID NO: 401 - DNA, 1176 bp, Brassica napus
atggtgaggctaaagcaattatggtcaagtattatggtattagccatagttgtgatcggagctggagcggtccccatcacatatcttgaatctgctgtggctaaaggagccgtgtgcttggacggtagcgcaccagcgtaccatttcgataaaggatctggttcaggtgtgaacaactggatcgttcatatggagggaggaggatggtgcactgatatagctacatgcgtaaaacgtaaaactacaatgaagggttcgtctaagtttatgaacaaagactttggtttctccggtatcttgggtggcaagcaaagcaccaatccagacttttataactggaacagaatcaaagttcggtattgtgatggttcatctttcaccggtgatatagaagccgttgatccgacaaacaagctcttcttccgcggtgctagggtttggcgtgcggtgatcgatgatcttatggccaagggaatgagcaacgctcaaaacgcgatactctccggttgttcagccggagcactggctgcgattctacattgcgacgaattcaagtccattctccccacaacagctaaggtcaagtgtgtttccgacgccggtttcttcatccacggtaaggatatcagtggaggatcttacatcgaatcatactacagcaaagtcgtatcgacccacggatctgcaaagagtcttcctgcttcttgcacctcaagtatgaagccagaattgtgtttcttcccgcaatacgttgtaaagaccatgcaaacaccacttttcgtaatcaatgctgccttcgattcttggcagatcaaaaatgttttggctccaacctctgttgataaacgcaaagagtggaaggattgtaagcttgatcttaagaagtgtacagccgctcagcttcaaaccgttcaagggtatagagaccaaatgttggctgcgttggcacctgttcgagcaacgacgactagaggattgttcttagattcgtgccacgctcattgccaaggtggaagtgccgccacttggtccggtgctcaaggcccccaagtcggcaatacgaaaatggcgaaagcggttggagactggttctatgagcggagtacgtttcagaacatagattgtccatctttgaattgcaatcctacttgtcctgcagtatccactgaagactaa

SEQ ID NO: 402 - protein, 391 aa, Brassica napus
MVRLKQLWSSIMVLAIVVIGAGAVPITYLESAVAKGAVCLDGSAPAYHFDKGSGSGVNNWIVHMEGGGWCTDIATCVKRKTTMKGSSKFMNKDFGFSGILGGKQSTNPDFYNWNRIKVRYCDGSSFTGDIEAVDPTNKLFFRGARVWRAVIDDLMAKGMSNAQNAILSGCSAGALAAILHCDEFKSILPTTAKVKCVSDAGFFIHGKDISGGSYIESYYSKVVSTHGSAKSLPASCTSSMKPELCFFPQYVVKTMQTPLFVINAAFDSWQIKNVLAPTSVDKRKEWKDCKLDLKKCTAAQLQTVQGYRDQMLAALAPVRATTTRGLFLDSCHAHCQGGSAATWSGAQGPQVGNTKMAKAVGDWFYERSTFQNIDCPSLNCNPTCPAVSTED

SEQ ID NO: 403 - DNA, 1248 bp, Brassica napus
atgagaagcgtgtggctgtggattgcggtggctgtgtgctcactatgctcagtcgcggcgattgttgggagcggatctagcgatggaattgggaaaccaagagacactgagataccggataacgaattgatggcgtctaaggtttcaatggtgcctctcaccttgattcatggtgctgactccaaaggagctgtgtgcttagatgggacgttacctggctaccatctagatcgtgggtttggttcaggtgctaacagttggcttatccatcttgagggtggaggatggtgtaacaatcgtagtagctgtgtgtttcgaaaaacaactcggcgtggctcctctaagttcatggagaaagctttgaacttcactgggatattgagcaataaacctcaagagaatcctgacttctttaactggaacagaatcaagttgcgctactgtgatggtgcttctttctctggagatagtcaggacgaggattcacaaattttctatcgaggaaaacgaatctggcaagcggcgatggaagagtttatgtctttagggatgcagaaagcagaacaggctctgctttctggttgttcagccggagggttagcttcaaccctgcactgtgatgacttcagggaacgattacctctttctacaaaagtaaagtgcttaagtgatgctggaatgttcctggacgcagtggatgtctctgggggacactcgctaaggaacatgttccaaggtgttgttacagtccagaacctccaaaaggacttgtccagtgcatgtacaaaccatttggatcctacttcgtgcttctttccacagaacttggtttcagacattaaaactcctatgtttcttctcaacgcagcttatgactcgcggcaggtcagacagagcttagctccttcacctgctgatccaagaggcgtctggaagcattgcaaaccagatatctcgcgctgtaattcatcacagcttcaattcttacaagaattcaggaaacaaatggtgcttgcattaaactcattctcagcatctccacagaacggtcttttcataaactcttgcttcacgcattgtcagtctgaaatacaggacacttggtttgctcaagattctcccaagttaaacggaaaaagagcggcagagtctgtaggtgattggtacttcgaccgatccaacaatgttaaagacattgactgtccttacccatgcgacaaaacatgtcaccatctgattttccaatga

SEQ ID NO: 404 - protein, 415 aa, Brassica napus
MRSVWLWIAVAVCSLCSVAAIVGSGSSDGIGKPRDTEIPDNELMASKVSMVPLTLIHGADSKGAVCLDGTLPGYHLDRGFGSGANSWLIHLEGGGWCNNRSSCVFRKTTRRGSSKFMEKALNFTGILSNKPQENPDFFNWNRIKLRYCDGASFSGDSQDEDSQIFYRGKRIWQAAMEEFMSLGMQKAEQALLSGCSAGGLASTLHCDDFRERLPLSTKVKCLSDAGMFLDAVDVSGGHSLRNMFQGVVTVQNLQKDLSSACTNHLDPTSCFFPQNLVSDIKTPMFLLNAAYDSRQVRQSLAPSPADPRGVWKHCKPDISRCNSSQLQFLQEFRKQMVLALNSFSASPQNGLFINSCFTHCQSEIQDTWFAQDSPKLNGKRAAESVGDWYFDRSNNVKDIDCPYPCDKTCHHLIFQ

SEQ ID NO: 405 - DNA, 1245 bp, Brassica napus
atgaacaagcttctgttgttggtagactttattgtagtgctaggaactactcaagcaaatgagtatttagatttcaatgtgacagagatagaccgcattgaggagctagagtttggattctccaaatacagctcaaatttgaaccctttattagttggtctcactctcatcagaggagctgattctggagctgtttgtttggatggaacattacctggataccacctgcaccgtggacatggatctggagctaacagctggctaattcaattggagggaggaggatggtgcaacaacgtcaggacctgtgtatacaggaagaagactcggcgtggttcatctaactacatggagaagcagcttcagtttacaggaatactgagtgataaagctcaagagaatcctgacttcttttactggaatagagttaagcttcgttactgtgatggcgcttctttcagtggagatggtcagaatcaggctgcacagcttcagtttagaggagagcgtatctggagagctgccatagctgatctgaaagccaaaggaatgcgatacgccaaccaggcacttctctctggatgctctgctggtggtttagcagctattttaccctgtgatgagtttaggaacttgttccctggttccaccaaggtcaagtgcttgagtgatgctggcttgttcttggacacagctgatgttgctggtggccgcacaatcaggaacttatacaatggtgtagtaaattttcagagtgtgaagaacaacctgcctcgtatgtgcacaaaccatcttgatccaacctcgtgtttcttcccacaaaatttgatcagtcagatgaaaactccactttttattgtcaatgcagcatatgatacatggcagatacaaagcagcatagctccaacatcagctgaccctagtgggttttggcatgactgtagactcaaccatgcaaaatgcacaccttcacaaatccggttcttgcaaggattcagggatcagatgctgagagtagtgaagggcttctcaatgtctagacataatggtttgttcataaactcatgtttcgctcactgccaaaccgagaggcaggacacttggttcgctgatgattctcctgtcataagaaaaaaggctgtggctatagctgtgggagattggtattttgatagagcagaagtgaagttaattgattgtccttacccttgtgacaagagctgccacaacttggtgttcagatga

SEQ ID NO: 406 - protein, 414 aa, Brassica napus
MNKLLLLVDFIVVLGTTQANEYLDFNVTEIDRIEELEFGFSKYSSNLNPLLVGLTLIRGADSGAVCLDGTLPGYHLHRGHGSGANSWLIQLEGGGWCNNVRTCVYRKKTRRGSSNYMEKQLQFTGILSDKAQENPDFFYWNRVKLRYCDGASFSGDGQNQAAQLQFRGERIWRAAIADLKAKGMRYANQALLSGCSAGGLAAILPCDEFRNLFPGSTKVKCLSDAGLFLDTADVAGGRTIRNLYNGVVNFQSVKNNLPRMCTNHLDPTSCFFPQNLISQMKTPLFIVNAAYDTWQIQSSIAPTSADPSGFWHDCRLNHAKCTPSQIRFLQGFRDQMLRVVKGFSMSRHNGLFINSCFAHCQTERQDTWFADDSPVIRKKAVAIAVGDWYFDRAEVKLIDCPYPCDKSCHNLVFR

SEQ ID NO: 407 - DNA, 1251 bp, Brassica napus
atggtgaagcttttgtcggtagggctcattgtagcttgctggctgatactaggaactcaagcaaatgagtatttagacttcaatgtaacagagatagaccgcattgaggaactagagtttggattctccaagtatagctccaatctgaaccctttattagttggtctcacccttatcagaggagctgactcaggagctgtttgtttggatggaacattgcccggataccacttgcaccgtggacatggatctggagctaacagttggctcattcaattagagggaggaggatggtgcaacaatgtcaggacatgtgtatacaggaagaagactagacgtgggtcatctaactacatggagaaagagcttcagtttacaggaatattgagtgataaagctcaagaaaatccagacttctttaactggaatagagttaagcttcgttactgtgatggcgcttctttcagtggagatggacagaatgaggctgcacagcttcagtttagaggagagcgtatctggagagcagccatagatgatttgaaagccaatggaatgcgatacgccgaccaggcacttctctctggatgctcagctggtggtttagccgctatcttacgctgcgatgagttcagggacttgttccctggttccaccaaagtcaagtgcttaagtgacgcaggcttgttcttggacacagctgatgtgtctggtggacgaacaataaggaacttatacaatggtatagtagagtttcagagtgtgaagaacaacctgcctcgtatctgcacaaaccatctcgatccaacttcgtgtttcttcccagagaatctgatcagtcagatgaaaactccacttttcattgtcaacgcagcatatgatacatggcagatacaaagcagcatagctccaaaatcagctgatcctagtgggttttggcatgactgtagactcaaccatgaaaaatgcacctctggtcaaatgcggttcttgcaaagtttcagggatcagatgctgagagtagtcaagggcttctcaatgtctagacagaatggtttgttcataaactcctgctttgctcactgccaaaccgagaggcaagatacttggtttgcagatgattctcctgtcatcagtaaaaaggcagtggcaatagctgtgggagattggtattttgatagagcagaagtgaagttagttgattgtccttacccatgtgacaagagctgccacaacatggtgttcagatga

SEQ ID NO: 408 - protein, 416 aa, Brassica napus
MVKLLSVGLIVACWLILGTQANEYLDFNVTEIDRIEELEFGFSKYSSNLNPLLVGLTLIRGADSGAVCLDGTLPGYHLHRGHGSGANSWLIQLEGGGWCNNVRTCVYRKKTRRGSSNYMEKELQFTGILSDKAQENPDFFNWNRVKLRYCDGASFSGDGQNEAAQLQFRGERIWRAAIDDLKANGMRYADQALLSGCSAGGLAAILRCDEFRDLFPGSTKVKCLSDAGLFLDTADVSGGRTIRNLYNGIVEFQSVKNNLPRICTNHLDPTSCFFPENLISQMKTPLFIVNAAYDTWQIQSSIAPKSADPSGFWHDCRLNHEKCTSGQMRFLQSFRDQMLRVVKGFSMSRQNGLFINSCFAHCQTERQDTWFADDSPVISKKAVAIAVGDWYFDRAEVKLVDCPYPCDKSCHNMVFR

SEQ ID NO: 409 - DNA, 1176 bp, Brassica napus
atggagaagcttaagcaatgttggtcgagtctgttagtcttggcagtggtggtgattggaaccggagccgttcccatcacttatcttcaaagcgccgtcgccaagggagcagtgtgtttaaatgggagtgctccggcttatcatttcgacaaagggtttggttcgggggttaacaactggattgttcatatggagggaggcggatggtgtacggacgtagcttcatgtagtgcgcgtaaaaatacaatgaagggttcgtcgaaattcatgaacaaagactttggcttctccggtatcttgggcggcaaacaaaacactaatccagatttttacaattggaatagaatcaaaggacgttattgcgatggatcatctttcaccggcaatgtagaagccgttaatccggcgaataagctattctttcgaggtgcacgagtttggcgtgcagtgattgatgatcttatggctaaaggaatgaaaaacgctcaaaatgcgatactctccggttgttcagccggagcattggccgcaattctacactgtgacactttccgagccatacttcccccaactgctagagtcaaatgtgtttctgacgccggttactttatccacggtacggatatctcaggaggatcatacatccaaacgtattacagtaaagtcgtcgcactccacggatctgcaaagagtcttcctgtttcatgcacatcaaaaatgaaaccagaactctgtttcttcccgcaaaacgttgttccttccatgcgaacaccactctttgtcattaatgccgccttcgattcctggcagatcaagaatgttttggcgccaactgctgttgataagcgtaaggagtggaagaactgtaagcttgatcttaagaaatgtacggccgctcagctcaaaaccgtccaagggtttagggatcagatgatgcgtgcattgtctccggttcactctactccgtccagaggactgttcttggactcgtgtcatgctcattgccaaggcggaagcgccgcctcttggtccggtgccaaaggtccccaagtcgccaattcgaaaatttcacaagcagtgggaaactggttttatggccggagtgcatttcagaagatagactgcccgtcgccgatttgcaaccctacttgtcctgcaatctccactgacgaatag

SEQ ID NO: 410 - protein, 391 aa, Brassica napus
MEKLKQCWSSLLVLAVVVIGTGAVPITYLQSAVAKGAVCLNGSAPAYHFDKGFGSGVNNWIVHMEGGGWCTDVASCSARKNTMKGSSKFMNKDFGFSGILGGKQNTNPDFYNWNRIKGRYCDGSSFTGNVEAVNPANKLFFRGARVWRAVIDDLMAKGMKNAQNAILSGCSAGALAAILHCDTFRAILPPTARVKCVSDAGYFIHGTDISGGSYIQTYYSKVVALHGSAKSLPVSCTSKMKPELCFFPQNVVPSMRTPLFVINAAFDSWQIKNVLAPTAVDKRKEWKNCKLDLKKCTAAQLKTVQGFRDQMMRALSPVHSTPSRGLFLDSCHAHCQGGSAASWSGAKGPQVANSKISQAVGNWFYGRSAFQKIDCPSPICNPTCPAISTDE

SEQ ID NO: 411 - DNA, 1185 bp, Brassica napus
atgtatgcgcttttgtggagttggagtttcacaggactctttctcttgagcattcttgcaaatggggttatgggttatgatgaaatggacttgttcaatggaacatatgtgtttcacaaacaagatgatgatgatggagatgttctggtagtaggactcactctggtccaagccgcaactgctgaaggagcggtgtgtcttgacgggtcaatgcctggatatcatttgtatcgtgggtatggttcaagagctaacaactggatcatccagttgcagggtggtgcgtggtgtgacagcatacaagattgtcagaaccgtaaaaggagtagttatggatcgtctactttaatggagaaacagttaaattttacaggactactaagcaataaagccgctgaaaatccagacttttacaactggaataaagtaaaagtacggtattgtgatggcgcatccttcagcggtgatagcgaaaacaagacggcacaacttcagtttagaggaaagcgtatatttttagccgtcatggaagatttgatggcaaagggaatgtgtcatgcgaagaaggctttgctcaacggatgttcgtctgggggtctttcagcgattctacgctgcgatgatttcagtagtctgtttcctcctaccaccaaagtaaaatgcatgagtgatgctggcttcttccttgatgcggttgatatatctggagctcattctataaggcgtatgtattctggtgtcgtaaacacccagggtttacaaaacacgcttcctcgtacatgcacaagccatcttgaacctacttcgtgccttttccctcaaaacataatcaaccaagtcaagacaccgctgtttattctcaactcggcatttgattcgtggcagattgagaatagtatagctccaccatctgctgatccgagtggcagttggcataattgtagctccagcttcaagtgcaacacctctcagatgcaattcttggaaggtttcaagatgagcatgttagatgccttaaagaccttttcgatgtcaagcaagaacggaatgtatattagctcgcgctgggctcattgtctagctgagagaaaagatacttggtctcctggaaattctcaaccgggtgaagatacggggatggctgtagctgttggagattggtacttcgaaagagcaaaaaagtaa

SEQ ID NO: 412 - protein, 394 aa, Brassica napus
MYALLWSWSFTGLFLLSILANGVMGYDEMDLFNGTYVFHKQDDDDGDVLVVGLTLVQAATAEGAVCLDGSMPGYHLYRGYGSRANNWIIQLQGGAWCDSIQDCQNRKRSSYGSSTLMEKQLNFTGLLSNKAAENPDFYNWNKVKVRYCDGASFSGDSENKTAQLQFRGKRIFLAVMEDLMAKGMCHAKKALLNGCSSGGLSAILRCDDFSSLFPPTTKVKCMSDAGFFLDAVDISGAHSIRRMYSGVVNTQGLQNTLPRTCTSHLEPTSCLFPQNIINQVKTPLFILNSAFDSWQIENSIAPPSADPSGSWHNCSSSFKCNTSQMQFLEGFKMSMLDALKTFSMSSKNGMYISSRWAHCLAERKDTWSPGNSQPGEDTGMAVAVGDWYFERAKK

SEQ ID NO: 413 - DNA, 1248 bp, Brassica napus
atggagattcccaggttcagcttcttgctacagtgcagaaaatgggctaagagcgattggcttgtggcttctattggattcgttttggtcgtcttcttcctctctttcttcttcgatcccactgttccctccattacatccccaactaatctggtcaaactcaagttgtctagtaaagctaaagagagaggagccttttgcttggatggaagcttgcctgggtatcattttgacaagggttcaggatctggctcgaatagctggcttcttcaccttcagggtggaggctggtgcaacacaatagcttcatgttccgctcgagcaatgactaggttaggctcttccaactactttgaagatgaagttgagtttccaggtgttttaagcaatgacccatctcaaaaccctgacttctttaactggaacagagttgtgatacggtactgtgatggtgcttctttcgctggacaccctgaagctgaattcaagaacggaacagggcttttcttccggggccagctcatctgggaggctattatggatgagctgttgtcgatgggcatgtcagatgccaaacagggcatacttactggatgttctgctggcggcttggcaactcttatacattgtgactactttcgtgatcatctccctaaagatgcagatgtcaaatgtgtttctgacggaggattctttcttaacgcgcttgatgtccttggaaaccctacgatgagatctttctatcatgatgttgttaccttgcagggcgtagataagagcttggatcagaattgtgtagccaaaatggagccatccacgtgtatgtttcctcaagaattcgttaataacatacgaacaccagtgtttcttgtcaactcagcttatgattcttggcagattcaaaatgtcttggtaccaacttctgctgattcagataaaagttgggcaaagtgcagactcagtattaaagaatgtgatgctgcacagatgaatgttctacagggttttcgcagctctctgatggatgccatagggaaatttcatcagaacaaagctggtgggatgttcatagattcatgcttcattcattgccaaacagttacgcaagggacatggcactcttccccaacctcaacaagaatcgaaaacaagacaattgccgagtctgtaggtgactggtacttcaaccgaaaaccggttaagctaattgattgtccttacccttgcaatccctcctgtcacaactga

SEQ ID NO: 414 - protein, 415 aa, Brassica napus
MEIPRFSFLLQCRKWAKSDWLVASIGFVLVVFFLSFFFDPTVPSITSPTNLVKLKLSSKAKERGAFCLDGSLPGYHFDKGSGSGSNSWLLHLQGGGWCNTIASCSARAMTRLGSSNYFEDEVEFPGVLSNDPSQNPDFFNWNRVVIRYCDGASFAGHPEAEFKNGTGLFFRGQLIWEAIMDELLSMGMSDAKQGILTGCSAGGLATLIHCDYFRDHLPKDADVKCVSDGGFFLNALDVLGNPTMRSFYHDVVTLQGVDKSLDQNCVAKMEPSTCMFPQEFVNNIRTPVFLVNSAYDSWQIQNVLVPTSADSDKSWAKCRLSIKECDAAQMNVLQGFRSSLMDAIGKFHQNKAGGMFIDSCFIHCQTVTQGTWHSSPTSTRIENKTIAESVGDWYFNRKPVKLIDCPYPCNPSCHN

SEQ ID NO: 415 - DNA, 1176 bp, Brassica napus
atggggaagcttaagcaatgttggtcaagtgtgctagtgttgtccatggtggtgatcggaacaggagccgtccccatcacttatctacaaagcgccgtagcaaaaggagccgtgtgtttggatggaagtgcaccagcttaccatttcgacaaagggtttggttcgggagttaacaactggattgttcacatggagggaggaggatggtgtaccgatgtggcttcatgtattaagcgtaagggtacaatgaagggttcgtccaaattaatgaacaaagactttggtttctccggtatcttgggtggcaagcaaaacactaacccagatttttacaattggaatagaatcaaagtacgttattgtgacggatcatctttcaccggcaatgtagaagctgttaatccggcgaataagctgttcttccgcggtgcacgagtttggcgtgcggtgatcgatgatctcatggctaaagggatgaaaaacgctcaaaatgcgatactctccggttgttcagccggagcattggcagctattctacattgtgacactttccgcgctattcttcctcggaccgctagagtcaaatgtgtttccgacgctggttactttattcacggcaaagatatctcaggaggatcatacatacaatcttattacagcaaagttgtcgcactccacggatctgcaaagagtcttcctgtttcatgcacctcaaaaatgaaaccagaactctgtttcttcccgcaatacgtcgtcccttccatgcgaacaccgctctttgtcattaacgctgcatttgactcctggcagatcaagaacgttttggctccgaccggagtagataagcgcaaagagtgggcgaactgtaagctcgatctcaagaaatgttcggccgctcagctcaaaacagtccaagggtttagagatcagatgatgcgtgcattgtctccgatccacagtactccgtcgagaggattgttcttggactcgtgtcacgctcattgccaaggaggaagcgccgcctcttggtccggcgccaaaggtccccaagtcgccaacacgaaaatatcgaaagcagttggaaactggttttacggtcggagtgcattccagaagatagactgcccttcgccgatttgcaatcctacttgtcctgcgatctctactgacgagtag

SEQ ID NO: 416 - protein, 391 aa, Brassica napus
MGKLKQCWSSVLVLSMVVIGTGAVPITYLQSAVAKGAVCLDGSAPAYHFDKGFGSGVNNWIVHMEGGGWCTDVASCIKRKGTMKGSSKLMNKDFGFSGILGGKQNTNPDFYNWNRIKVRYCDGSSFTGNVEAVNPANKLFFRGARVWRAVIDDLMAKGMKNAQNAILSGCSAGALAAILHCDTFRAILPRTARVKCVSDAGYFIHGKDISGGSYIQSYYSKVVALHGSAKSLPVSCTSKMKPELCFFPQYVVPSMRTPLFVINAAFDSWQIKNVLAPTGVDKRKEWANCKLDLKKCSAAQLKTVQGFRDQMMRALSPIHSTPSRGLFLDSCHAHCQGGSAASWSGAKGPQVANTKISKAVGNWFYGRSAFQKIDCPSPICNPTCPAISTDE

SEQ ID NO: 417 - DNA, 1197 bp, Glycine max
atggagagtgcaagaatcagccaatggttaaatcttcttgtttgtgtactgctattgctcaaggcagaaggatctttagttccattgattttggtcgagaatgcagaatcaaaaggagctgtttgtttggatggaagtcccccagcttaccactttgataagggatttggggaaggtattaatagctggattgttcacattgagggaggaggatggtgcaacaatatcgagagttgccttgaccgtaaggacactcgcttaggttcatctaagcaaatggaggatatttacttttctggaattttaagcaatgagcaacagtttaatccagatttctacaattggaatagagtcaaggttaggtactgtgatggttcatcgtttactggtgatgtggaagaagttgatccaacaaccaatttgcacttcagaggagcaaggattttttcagctgtaatagaagaattactagcaaaaggattggaaagggctgaaaatgctattctctctggctgttcagctggaggattgacaactatattacactgtgatagctttaaaacttttttgccctctagagctaatgtgaaatgtgttccagatgctggttattttgtcaatgtagaggatatctcgggagcacatttcattcaacagtactacagtgaagttgtttcaacacatggttctgcaaagaatttgcccacatcctgcacttcaaaactcagcccaacactatgcttttttccacaatatgtggcatcacatatcagtaccccaatcttcgttgttaattcagcctatgactcgtggcagattcgatacatctttgtacctggctctgctgatcccagtgatagttggaatagctgcaaggttaatatgagcaactgctcgcctgatcaactaagtaaattgcaaggcttcaagagtgaattcgaaagggcattgagtgaggtaggagattctccatctaaaggaatgtttattgactcttgctatgcccactgccaaacagaaccacaggagacatggtttaagactgactctccaaagcttgccaatacaactattgccaaggcagtggcagactggttttatgggccaagttctttccgccatgtggattgcaattatccttgcaacccttcttgccagaaccgtgtttttgatctaaaagacctccctggaatatag

SEQ ID NO: 418 - protein, 398 aa, Glycine max
MESARISQWLNLLVCVLLLLKAEGSLVPLILVENAESKGAVCLDGSPPAYHFDKGFGEGINSWIVHIEGGGWCNNIESCLDRKDTRLGSSKQMEDIYFSGILSNEQQFNPDFYNWNRVKVRYCDGSSFTGDVEEVDPTTNLHFRGARIFSAVIEELLAKGLERAENAILSGCSAGGLTTILHCDSFKTFLPSRANVKCVPDAGYFVNVEDISGAHFIQQYYSEVVSTHGSAKNLPTSCTSKLSPTLCFFPQYVASHISTPIFVVNSAYDSWQIRYIFVPGSADPSDSWNSCKVNMSNCSPDQLSKLQGFKSEFERALSEVGDSPSKGMFIDSCYAHCQTEPQETWFKTDSPKLANTTIAKAVADWFYGPSSFRHVDCNYPCNPSCQNRVFDLKDLPGI

SEQ ID NO: 419 - DNA, 1200 bp, Glycine max
atggagatcactagaataggccaatggttaagtcttctgatatgtgtactactattactgcagacagaaggggttcctgtgggaatcacttttgttgaaaatgcagtggcaaaaggggctgtttgtttggatgggagtcctccagcttaccacttccacaagggatctggagcagggattaacaactggatagttcactttgagggaggaggatggtgcaacaacgttactacttgcctttcccgtagggacactcgattaggttcatctaagaaaatggatacatcactttccttttctgggcttttcaggaacagtaaaaagttcaatccagatttctatgattggaacagaatcaaggttagatattgcgatggatcatcatttactggagatgctgaagctgttgatccgaaaaccaatttgcacttcagaggagcaagggtttttgctgtggtcgttgaggatttattagcaaaaggaatgaaaaatgctcaaaatgcaattatctccggatgttcagctggaggattggcttctattctaaattgcgatcgattcaaatcactactacctgcaacaactaaagtgaaatgccttgcagatgctggtttttttatcaatgtaaaggatgtctctggagcacagcgcattgaagagctctacagtcaagctgttcaaacacatggctcagcaaagaatttgcctacatcctgcacttcaagactcagaccagggctgtgctttttccctcaaaatgtcgtgtcccaaatcagtaccccaatcttctttgtaaatgcagcctatgactcatggcagatcaaaaacattctggcaccaggtgctgctgatccccgtggccaatggcgtgaatgcaagcttgatatcaaaaactgctcacctaatcaactcagtgtaatgcaaggattcaggacagatttcttaagggcatttagtgtggttggcaacgccgcatctaaagggcattttatagatggttgctatgcacactgccaaactggaatacaagagacatggctgagaaatgactccccagtggtggccaagacatcaattgcaaaggcagtgggtgattggttttatgatcgaaggcccttccgtgagatagattgtgcctacccttgcaaccctacttgccataatcgtatttttgatcagaatgagcgtccagacgtatag

SEQ ID NO: 420 - protein, 399 aa, Glycine max
MEITRIGQWLSLLICVLLLLQTEGVPVGITFVENAVAKGAVCLDGSPPAYHFHKGSGAGINNWIVHFEGGGWCNNVTTCLSRRDTRLGSSKKMDTSLSFSGLFRNSKKFNPDFYDWNRIKVRYCDGSSFTGDAEAVDPKTNLHFRGARVFAVVVEDLLAKGMKNAQNAIISGCSAGGLASILNCDRFKSLLPATTKVKCLADAGFFINVKDVSGAQRIEELYSQAVQTHGSAKNLPTSCTSRLRPGLCFFPQNVVSQISTPIFFVNAAYDSWQIKNILAPGAADPRGQWRECKLDIKNCSPNQLSVMQGFRTDFLRAFSVVGNAASKGHFIDGCYAHCQTGIQETWLRNDSPVVAKTSIAKAVGDWFYDRRPFREIDCAYPCNPTCHNRIFDQNERPDV

SEQ ID NO: 421 - DNA, 1203 bp, Glycine max
atggagaatgcgagaataagccagtggttgaaccttctggtgtgtgcactgctgttgctgatatcagaagcttcttatgtgccaatcactattgttcagaacgcggtacgaaaaggagctgtttgtttggatgggagtccaccagcttatcattttgataggggatttggatcagggattaacaattggttggttgcatttgagggaggaggatggtgcaacaatgtcactacttgccttgctcgcaagaccaatcgtttaggttcatctaagcaaatggccaagctaattgccttttcaggaattttgaataacagggaaatgtttaatccagatttctacaactggaacagaatcaaggttaggtattgtgatggttcgtcatttactggtgatgtggaagcagtgaatccggtaactaagttgcacttcagaggagcaaggattttcaatgctgtcatggaagatttactagcaaaaggaatgaaaaatgctcgaaatgctattatctcaggatgctcagccggaggattaacatcagtactgcattgtgatcgatttcgagctctattacctagaggagctagagtgaaatgcctctcagatgctggttactttatcaatgcaaaggatgttttgggagaacaacacattgagcagtatttcagtcaagttgttgtcacacatggctctgccaggagtttgcctcaatcatgcacttcaagacttagcgcaaaactgtgctttttcccacaatatttggtgtcacgcattactacaccaatcttctttgtaaacgcggcatacgactcatggcagattaagaacattttggcaccgggtgttgctgatcctgaaggccattggcatagctgcaagcttgatataaacaactgctcacctgatcaactcgatctaatgcaaggcttcaggacagaatttttaagggctataactgtgcttggcaactcttcatctaaaggaatgttcatagactcttgctatgcccactgccaaactgaaatgcaggagacatggttgagaagtgactctccagagctgaaaaagacaacaattgcaaaggctgtagcagattggttttatgaaagaagacctttccatcagatagattgcccttacccttgcaaccccacttgtcacaaccgcgttttcgatccacaagaagaccacccaggagtatag

SEQ ID NO: 422 - protein, 400 aa, Glycine max
MENARISQWLNLLVCALLLLISEASYVPITIVQNAVRKGAVCLDGSPPAYHFDRGFGSGINNWLVAFEGGGWCNNVTTCLARKTNRLGSSKQMAKLIAFSGILNNREMFNPDFYNWNRIKVRYCDGSSFTGDVEAVNPVTKLHFRGARIFNAVMEDLLAKGMKNARNAIISGCSAGGLTSVLHCDRFRALLPRGARVKCLSDAGYFINAKDVLGEQHIEQYFSQVVVTHGSARSLPQSCTSRLSAKLCFFPQYLVSRITTPIFFVNAAYDSWQIKNILAPGVADPEGHWHSCKLDINNCSPDQLDLMQGFRTEFLRAITVLGNSSSKGMFIDSCYAHCQTEMQETWLRSDSPELKKTTIAKAVADWFYERRPFHQIDCPYPCNPTCHNRVFDPQEDHPGV

SEQ ID NO: 423 - DNA, 1266 bp, Glycine max
atgagaatggggaacctcttctggcttggcattgttgcagcacttgttttcagcttctgggttgattccttttctgcctatgaatatcaccacttcaatgaaaccgagttctctttgttggagtctcaagaacaggtacattcatccctccttgggagaacttctctcatggttggactcacagttattcaaagtgctgctggcaaaggagcagtttgcttggatggaacattgcctgcttatcatttgcatcggggatatggatcaggagcaaacagctggatcgttaatttagagggaggtgggtggtgtaatgacgttagatcatgtgtttatcgcaagaaaacacggcgtgggtcatcaacattcatggaaaaacagataccttttactggaatattaagcaataatgttgaagataatccagattttttcaactggaacagagtgaaaattcgttattgtgacggtgcctcttttgctggggatggtgaagataaggctgcgcaactgcaatttagaggacagcgtatttggtcggcagcaatcgaagatttgatgtcaaagggaatgcgatttgccaggcaggctcttctttctggatgctcggctggtggtttggctactattatacactgtgatgaattcagaggttttttcccacagactacgaaagtgaagtgtcttagtgatgcaggattatttcttgatgcgattgatgtctccaggggacataccatcaggaattttttcagtggtgtcgtaaggctacagggagtgcaaaagaatctgccacacatttgtactagtcaccttgatcccacttcgtgcttcttccctcagaatttgattgccggtattagaaccccactattcattcttaatacagcctatgactcatggcaggtccaaacaagcttagctccttcatcagcagatccccatggcttttggcatgattgcagattaaatcatgctaaatgtacttcttcacaaatccaatatttgcaaggattcaggaatcaaatgctgaatgctattaaaggcttctcaagatcacgtcagaatggattgttcataaattcatgttttgctcactgccaatctgagaggcaggatacatggtttgctgacaactctcctgtcattgggaacaaggcaattgctctttctgttggagactggtatttcgaccgagcagttgttaaggccattgattgtccttacccttgtgataatacatgccaccatcttgtcttcagatga

SEQ ID NO: 424 - protein, 421 aa, Glycine max
MRMGNLFWLGIVAALVFSFWVDSFSAYEYHHFNETEFSLLESQEQVHSSLLGRTSLMVGLTVIQSAAGKGAVCLDGTLPAYHLHRGYGSGANSWIVNLEGGGWCNDVRSCVYRKKTRRGSSTFMEKQIPFTGILSNNVEDNPDFFNWNRVKIRYCDGASFAGDGEDKAAQLQFRGQRIWSAAIEDLMSKGMRFARQALLSGCSAGGLATIIHCDEFRGFFPQTTKVKCLSDAGLFLDAIDVSRGHTIRNFFSGVVRLQGVQKNLPHICTSHLDPTSCFFPQNLIAGIRTPLFILNTAYDSWQVQTSLAPSSADPHGFWHDCRLNHAKCTSSQIQYLQGFRNQMLNAIKGFSRSRQNGLFINSCFAHCQSERQDTWFADNSPVIGNKAIALSVGDWYFDRAVVKAIDCPYPCDNTCHHLVFR

SEQ ID NO: 425 - DNA, 1281 bp, Glycine max
atgacaatgaagctggttttggtagttgttgttgaagttgcatgcttagtttctgggatcttgtcctttggatctgagacactctctgagctttctttcttagaaaatgatgtcgtctcaacaacaagaccttcctcttcatctcaacttcaacctcaacctcaacctcaacctcttatggtggacctcactctcattcatgaagctgattctaaaggagctgtctgtttggatggaacggtgcctggataccatttggatcgtggatttggatctggtgcagatagttggcttattcatttggagggaggaggatggtgtaataccatcagaaactgtgtctatagaaaaaatactcgtcgtggatcctcaaaatacatggaaaatcaaataccattcacgggaatattgagcaacaaacctgaagaaaaccctgatttctttaactggaatagagttaaattacggtactgtgatggagcatctttcagtggagatagtgaagatgagtctgcacagctccagtttcgaggacaaaaaatatggctagctgcaatggaggaattaatgtccaaaggaatgcagaaagccgatcaggcacttctctctggatgctctgcgggtggtctggcatccataatacactgtgatgagttcgggagcttgtttggaaaatcttccaaagttaaatgtttgagcgatggaggtttttttcttgatgcaatggatgtatctgggggacgcacactgaggactcttttcggaggtgtggttcagttgcaggagttacaaaaaaatctgccaaaaagttgtcttgaccaactagacccaacttcgtgcttctttcctcagaatatgatcgaacatgttgagaccccattgtttctactcaacgctgcttatgatgtgtggcaggtccaagccagtttagccccaccttcagctgaccgccttggttcttggaatgaatgcaaatcgaaccatgcaaattgtagctcatctcaaatgcagttccttcaagacttcagaaatcaaatgcttagtgacattaaagacttctcgagctcatctcaaactgggctattcataaattcttgttttgctcattgtcagtctgagagacaggagacatggtttgctgatgactctccccttatcgaggacaagccaattgcagttgctgttggagactggtattttgatcgagaagttgtcaaagctattgactgtgcttacccatgtgacaacagctgccataatctggtgtttaactttaagtga

SEQ ID NO: 426 - protein, 426 aa, Glycine max
MTMKLVLVVVVEVACLVSGILSFGSETLSELSFLENDVVSTTRPSSSSQLQPQPQPQPLMVDLTLIHEADSKGAVCLDGTVPGYHLDRGFGSGADSWLIHLEGGGWCNTIRNCVYRKNTRRGSSKYMENQIPFTGILSNKPEENPDFFNWNRVKLRYCDGASFSGDSEDESAQLQFRGQKIWLAAMEELMSKGMQKADQALLSGCSAGGLASIIHCDEFGSLFGKSSKVKCLSDGGFFLDAMDVSGGRTLRTLFGGVVQLQELQKNLPKSCLDQLDPTSCFFPQNMIEHVETPLFLLNAAYDVWQVQASLAPPSADRLGSWNECKSNHANCSSSQMQFLQDFRNQMLSDIKDFSSSSQTGLFINSCFAHCQSERQETWFADDSPLIEDKPIAVAVGDWYFDREVVKAIDCAYPCDNSCHNLVFNFK

SEQ ID NO: 427 - DNA, 1236 bp, Glycine max
atgagaatgaagaagctgattttaatactcatagcagcatttaccttcgtttctgtggctagatctgcgtctgatcatttcttcgaaaacgatggcgtttcactggcagttgctgcaacgcccggacctccacctctcatggtccccctcactcttattcagggagctgcttccaaaggagccgtctgtttggatggaacattgcctggttaccactttcatcctggatttggatctggggcaaatagttggctcattcaattggagggaggaggatggtgtaataccatcagaagttgtgtctttagaaaaactactcgtcgtggttcctcaaaatacatggaaaaacaactagcattcacagggatattgagcaataaagctgaagaaaaccctgatttctttaactggaacagagttaaagtacggtactgtgatggggcatctttcagtggagatagtcaaaacgaggttgcacagcttcaatttcgaggacaaaaaatatggcaagctgcaatgcaggaattattgttcaagggaatgcagaaggccaaccaggcccttttgtctggatgctctgcaggtggtctggcatctataatacattgtgatgagttccggagcttgtttcctacatctaccaaagtgaaatgtttgagtgatgccgggtttttcctagatgcggttgacatatctgggggtcacacactgaggaatctgtttggaggtgtagttaaattacaggaggtgcaaaaaaatctgccaaacagttgtctcaaccaactggacccaacttcgtgcttttttcctcagaatttgatcaaccatgttgaaactccattgtttctactcaatgcagcttatgatgcatggcaggtccaagaaagtttggccccacattcagcagatccccatggctcttggaatgattgtaaatcaaatcatgcacgctgtaactcatctcaaattcagttcctccaagacttcagaaatcaaatgctaaatgatgtgaaaggcttctcagggacatctcaaactgggttattcataaattcttgttttgctcattgccagtctgagagacaagatacatggtttgctgatgactctccactaattaacaacatgccaattgcaattgctgttggagactggtttttggatcggaaaactgtcaaagctatcgactgtgcttacccctgtgacaatacatgccataatctggtcttcaagtga

SEQ ID NO: 428 - protein, 411 aa, Glycine max
MRMKKLILILIAAFTFVSVARSASDHFFENDGVSLAVAATPGPPPLMVPLTLIQGAASKGAVCLDGTLPGYHFHPGFGSGANSWLIQLEGGGWCNTIRSCVFRKTTRRGSSKYMEKQLAFTGILSNKAEENPDFFNWNRVKVRYCDGASFSGDSQNEVAQLQFRGQKIWQAAMQELLFKGMQKANQALLSGCSAGGLASIIHCDEFRSLFPTSTKVKCLSDAGFFLDAVDISGGHTLRNLFGGVVKLQEVQKNLPNSCLNQLDPTSCFFPQNLINHVETPLFLLNAAYDAWQVQESLAPHSADPHGSWNDCKSNHARCNSSQIQFLQDFRNQMLNDVKGFSGTSQTGLFINSCFAHCQSERQDTWFADDSPLINNMPIAIAVGDWFLDRKTVKAIDCAYPCDNTCHNLVFK

SEQ ID NO: 429 - DNA, 1266 bp, Glycine max
atgagaatggggaacctcttctggcttggcattgttgcagcacttgttttcagcttctgggttgattccttttctgccaatgaatatcaccacttcaatgaaaccgagttctctttgttggagtctcaagaacaggtacattcatccctccttgggagaacttctctcatggttggactcacagttattcaaagtgctgctggcaaaggagcagtttgcttggatggaacattgcctgcttatcatttgcatcggggatatggatcaggagcaaacagctggatcgttaatttagagggaggtgggtggtgtaatgacgttagatcatgtgtttatcgcaagaaaacacggcgtgggtcatcaacattcatggaaaaacagataccttttactggaatattaagcaataatgttgaagataatccagattttttcaactggaacagagtgaaaattcgttattgtgacggtgcctcttttgctggggatggtgaagataaggctgcgcaactgcaatttagaggacagcgtatttggtcggcagcaatcgaagatttgatgtcaaagggaatgcgatttgccaggcaggctcttctttctggatgctcggctggtggtttggctactattatacactgtgatgaattcagaggttttttcccacagactacgaaagtgaagtgtcttagtgatgcaggattatttcttgatgcgattgatgtctccaggggacataccatcaggaattttttcagtggtgtcgtaaggctacagggagtgcaaaagaatctgccacacatttgtactagtcaccttgatcccacttcgtgcttcttccctcagaatttgattgccggtattagaaccccactattcattcttaatacagcctatgactcatggcaggtccaaacaagcttagctccttcatcagcagatccccatggcttttggcatgattgtagattaaatcatgctaaatgtacttcttcacaaatccaatatttgcaaggattcaggaatcaaatgctgaatgctattaaaggcttctcaagatcacctcaaaatggattgttcataaattcatgttttgctcactgccaatctgagaggcaggatacatggtttgctgacaactctcctgtcattgggaacaaggcaattgctctttctgttggagactggtatttcgaccgagcagttgttaaggccattgattgtccttacccttgtgataatacatgccaccatcttgtcttcagatga

SEQ ID NO: 430 - protein, 421 aa, Glycine max
MRMGNLFWLGIVAALVFSFWVDSFSANEYHHFNETEFSLLESQEQVHSSLLGRTSLMVGLTVIQSAAGKGAVCLDGTLPAYHLHRGYGSGANSWIVNLEGGGWCNDVRSCVYRKKTRRGSSTFMEKQIPFTGILSNNVEDNPDFFNWNRVKIRYCDGASFAGDGEDKAAQLQFRGQRIWSAAIEDLMSKGMRFARQALLSGCSAGGLATIIHCDEFRGFFPQTTKVKCLSDAGLFLDAIDVSRGHTIRNFFSGVVRLQGVQKNLPHICTSHLDPTSCFFPQNLIAGIRTPLFILNTAYDSWQVQTSLAPSSADPHGFWHDCRLNHAKCTSSQIQYLQGFRNQMLNAIKGFSRSPQNGLFINSCFAHCQSERQDTWFADNSPVIGNKAIALSVGDWYFDRAVVKAIDCPYPCDNTCHHLVFR

SEQ ID NO: 431 - DNA, 1263 bp, Helianthus annuus
atgaggaaccaggtttgtacatgggttttgatattcttgattggattcggtgttttgggaagtgggtatgagtttgctgagacagatttccattacaatacaagcgaagttatttcattcatggaagcttcttcttctgctgttgttgcccctaatcctcttattgttggtctcactcttattccaggagctgctgctaaaggagctgtatgtttggatggaacattacccgggtatcatttgcaccgaggattcgaatcgggcgcaaacagttggctcattcaattggagggtggaggatggtgtaacactgttagatcttgtgtttaccggaaaacaaccaggcgtggatcatcaaaattttttgagaaacagttggcgtttaccggaattttgagcaataaagctgaagataatccagattttttcaactggaatcgagtaaaggttcgctattgtgatggtgcatcatttgccggggatgcagaagataaggctaatgacctccaatttagaggccacaaaatattcttggcagcaatggaagacttgatgtcaaagggattgcgaaatgctgatcaagcacttctttctgggtgctcggcaggcggtttggcatctattttacactgtgacgagtttagttctttattccccggaagcactaaagtcaagtgtttggctgatgctggaaaatgtaaggacgcgattgatgttgctggtgcacgtacactaaggaacatgtatgaaggtgttgtaaccttgcagggggttgctaaaaacttatcgccggcatgtatcagccaactcgacccaacctcgtgcttttttcctcagaacatagttccccacattaagactcctatgttcatcctcaatgctgcatacgattcttggcaggttgtttccagtttatgcactccacccgcggatcctactggtgcttggaaggcatgcaagcacaacactgacagttgttcaccatctcagatgaacttctttcaagatttcagaaaccagatgctgaatgcacttaaaggattctctacgtccaaacaaaacgggctgtttataaattcttgtttcgcgcattgccaaacagagaggcaggatacatggtttgcagatgattctccgattattaacaacaagccggtagcgttggcggtgggagactggtatttcgatagatcaagcgtgaaagaaacagactgcccgtatccatgtgacaagagttgtcacaatctgcaatttagatcataa

SEQ ID NO: 432 - protein, 420 aa, Helianthus annuus
MRNQVCTWVLIFLIGFGVLGSGYEFAETDFHYNTSEVISFMEASSSAVVAPNPLIVGLTLIPGAAAKGAVCLDGTLPGYHLHRGFESGANSWLIQLEGGGWCNTVRSCVYRKTTRRGSSKFFEKQLAFTGILSNKAEDNPDFFNWNRVKVRYCDGASFAGDAEDKANDLQFRGHKIFLAAMEDLMSKGLRNADQALLSGCSAGGLASILHCDEFSSLFPGSTKVKCLADAGKCKDAIDVAGARTLRNMYEGVVTLQGVAKNLSPACISQLDPTSCFFPQNIVPHIKTPMFILNAAYDSWQVVSSLCTPPADPTGAWKACKHNTDSCSPSQMNFFQDFRNQMLNALKGFSTSKQNGLFINSCFAHCQTERQDTWFADDSPIINNKPVALAVGDWYFDRSSVKETDCPYPCDKSCHNLQFRS

SEQ ID NO: 433 - DNA, 1317 bp, Hordeum vulgare
atggccgccgtcaccgagcagctcctccttccccatgagcagcaccgtcgacgtccggcacgggtgcttgctgtcaccgtatcggtcgcagtggtcccgctgctgctgctggtggtggtccctgccagcctcctccgtcgtacgctgctcggcgcgccatcgacggaccgcgtcgcgctcaccctcctcgctggtgcgaaggagaagggcgcagtgtgcctggacggaacaccgccggggtaccacctgcagaggggctccggtgagggcgccgaccgctggctcgtccatctagagggaggaggctggtgcagcacagtcaaggaatgttccgaccgcagactgtccagccaaggttcatccaacttcatgagatcgataaggttcatgggcaatgggatcctcggcggtgatcagctgcagaatcctgatttctacaactggaacaaagtctacgtgcggtactgcgatggcgcatcgttttctggcgacgcggaagctcaagcagaggatggaaccacactatacttcagaggattgcgtatctatgaagcagttatcgacgaactcatggaaaaaggactcgccagtgctacacaggccctctttacaggctgctctgctggtgctctatccatgatgctgcattgcgatgatttccgtgcaagatttcctcaggaggtttcagttaaatgctttgcggatgctgggttcttcattgatgaaaaggatatatccggaaaaaggtccctttggtctctgtacgatagagccattcacctccagaatgttagaaaagtgttgcccaaggactgccttgccaacaaggagccaaccgagtgtttcttcccggcagagcttattaagagcatccgcaccccaatgtttattctcaaccctagttatgattcatggcagatacgaaatgttcttgtacctgattcatctgctcctgacaagtcatggttgagttgcaaggaaaatatccgaaactgcaactctacacaagttgaagtcctcaatggattgaggaataagatggtcaatgacttgaaggtcgtcgaagataaggaggactggggcatgttcatcgactcatgcttcacgcactgccaatccctctccggcatctcttggcattcgccaacctccccgaggcttgaaaataagaccattgcagaagctgttggagactggcactctggaaggagccaaggagcgaaagagattgactgcaagtatcagtgcaacccaacatgcaatagtttaccgcctccacgagatgttactgcattcgaccgtgtcgagatctactaa

SEQ ID NO: 434 - protein, 438 aa, Hordeum vulgare
MAAVTEQLLLPHEQHRRRPARVLAVTVSVAVVPLLLLVVVPASLLRRTLLGAPSTDRVALTLLAGAKEKGAVCLDGTPPGYHLQRGSGEGADRWLVHLEGGGWCSTVKECSDRRLSSQGSSNFMRSIRFMGNGILGGDQLQNPDFYNWNKVYVRYCDGASFSGDAEAQAEDGTTLYFRGLRIYEAVIDELMEKGLASATQALFTGCSAGALSMMLHCDDFRARFPQEVSVKCFADAGFFIDEKDISGKRSLWSLYDRAIHLQNVRKVLPKDCLANKEPTECFFPAELIKSIRTPMFILNPSYDSWQIRNVLVPDSSAPDKSWLSCKENIRNCNSTQVEVLNGLRNKMVNDLKVVEDKEDWGMFIDSCFTHCQSLSGISWHSPTSPRLENKTIAEAVGDWHSGRSQGAKEIDCKYQCNPTCNSLPPPRDVTAFDRVEIY

SEQ ID NO: 435 - DNA, 1314 bp, Oryza sativa
atggcgtcgccgacgtcctccgcctccgcgccggcgagccaccacctgcgcctctggtggcgccgccgcggccgcggcggcgccgtcggggccaccttcaccgtcgcgctcctcgccgccgcgctgctcctcgccctctccttgtacgcctcctccctgccccgcgcgcctaccacgccctcctcctcctctaacctcgtcggcctcaccctcgtccgccgcgccaaggagaagggcgcggtgtgcttggatgggagcgcgccggggtaccatctgcagagaggctccggcactggatctcaaaactggctccttcacttggagggcggaggctggtgccggaatctgaggtcatgtgcttcacgtcaaaaatcggtgttgggttcatcgcaatacatggaatgccagattgagtttgctgggatcttgagtaatgacaaatttcaaaacccagatttttacaattggaataaagttaagataaggtattgtgatggggcatcattttctggaaacgtcaagaacgaattgcagaatggcacaaaattctttttccggggccagcgtatctgggaggcagtaatgagcgaacttctactaaagggactcaggcatgccaaacaggcttttctaacaggatgctctgctggtgggctagccactttcattcactgcgataatttccgtacactgctaccaaaggattctagggttaagtgtcttgcggatggtggatttttcctcgatgtagaggacatttctgggcaaaggaccatgcgagcattctacaacgatgttgtccgtcttcaggatctgcgtggaaggtttccccattgtggtccaaacatggatctgggccagtgcttcttcccaagtgaagttgtaaaggacatcatcaccccagtatttgttcttaatccagcgtatgatgcttggcaggtgcaacatgtgttgagtccagtagcatctgaccctcaacattcatggctagaatgcagactggatattagcaagtgtgattcgaaccaacttgaaattctccaaggttttaggaaaaagttacatgatactataagtgaacttaagcacaaaaaggactggggcttttttatcgactcatgctttatacactgtcagtcgttgaactccttgacttggcattctccatcttctcttagagtcaacaacaagaccattgcagaggcggttggagattggttctttgacagaagagaggtgaaggaaattgattgtgaatatccctgcaacccgacttgccacaacttggtttttgccaagcctttcaaggcatga

SEQ ID NO: 436 - protein, 437 aa, Oryza sativa
MASPTSSASAPASHHLRLWWRRRGRGGAVGATFTVALLAAALLLALSLYASSLPRAPTTPSSSSNLVGLTLVRRAKEKGAVCLDGSAPGYHLQRGSGTGSQNWLLHLEGGGWCRNLRSCASRQKSVLGSSQYMECQIEFAGILSNDKFQNPDFYNWNKVKIRYCDGASFSGNVKNELQNGTKFFFRGQRIWEAVMSELLLKGLRHAKQAFLTGCSAGGLATFIHCDNFRTLLPKDSRVKCLADGGFFLDVEDISGQRTMRAFYNDVVRLQDLRGRFPHCGPNMDLGQCFFPSEVVKDIITPVFVLNPAYDAWQVQHVLSPVASDPQHSWLECRLDISKCDSNQLEILQGFRKKLHDTISELKHKKDWGFFIDSCFIHCQSLNSLTWHSPSSLRVNNKTIAEAVGDWFFDRREVKEIDCEYPCNPTCHNLVFAKPFKA

SEQ ID NO: 437 - DNA, 1176 bp, Triticum aestivum
atggggagcggaagcaagctccgtctctggtgctcggcgttcgcctgcgcgctggcgttcctcggggcgcacggggacgacgaccatctcgtcgacattacctacgtcgagagcgccgtggccaagggagcagtatgtctggacgggagccccccggcgtaccatctcgacccgggctccggctccggggtgaacagctggttggttcatttcgagggaggggcgtggtgcaacaatgcgatgacctgcctgcaacggtcgcgcaccccgttggggtcgtccaaggagatggccaagcgggttgctttcaccgggatcttgagcaacgcgtcgggttacaacccagacttctacaactggaacaaggtcaaggttcggtactgcgacggctcgtctttcaccggcgacaaggaagaagttgatcctagcacagagctacactacagaggtgcgagggtgtggcaagcagttatagaagatctgctcgcgaaaggaatgaacaaagctgaaaatgctctgatttcgggatgttctgctggtgggctaacttcgatactgcactgcgacagatttcatcagctcctgccagtggatgccaatgttaaatgcctttcagatgccggtttcttcatcaacgtgaaggacattaccggagccaaccacgttgaggcatttttcagtgatgtgggtacaacacatggctcggcaaagaatttaccatcttcgtgcacttccaagttgcctgcaggcgtgtgcttttttcctcagaacgaggtgcagcagatccagacgcccctgttcatcctaaatgcagcatacgactcatggcaggtacggcacatcctggtgcccgagggctccgatcccgaatggcgaagttgcagggacgacataacccagtgctccgcgaaccagctcgagacgctgcaggggttcagggacgatttcctggcggcgctgggggcgagcgcgtccagcggatccagagggctgttcgtcaactcgtgcttcgcgcactgccagtccgagacgcaggacatctggttcgcgcccgcttccccggcgctcggagacagaagaatagcggacgcggttggggactggttctacggccgcagcgggttccagaagacggactgcccctacccttgtgactccacctgctacactaattga

SEQ ID NO: 438 - protein, 391 aa, Triticum aestivum
MGSGSKLRLWCSAFACALAFLGAHGDDDHLVDITYVESAVAKGAVCLDGSPPAYHLDPGSGSGVNSWLVHFEGGAWCNNAMTCLQRSRTPLGSSKEMAKRVAFTGILSNASGYNPDFYNWNKVKVRYCDGSSFTGDKEEVDPSTELHYRGARVWQAVIEDLLAKGMNKAENALISGCSAGGLTSILHCDRFHQLLPVDANVKCLSDAGFFINVKDITGANHVEAFFSDVGTTHGSAKNLPSSCTSKLPAGVCFFPQNEVQQIQTPLFILNAAYDSWQVRHILVPEGSDPEWRSCRDDITQCSANQLETLQGFRDDFLAALGASASSGSRGLFVNSCFAHCQSETQDIWFAPASPALGDRRIADAVGDWFYGRSGFQKTDCPYPCDSTCYTN

SEQ ID NO: 439 - DNA, 1182 bp, Triticum aestivum
atggcatttgggctgccccgcgccgcggcggcggtggtgacgctggtgctcggcctcgccgcggcgtcggccgtggcggacgacgtggagatggtgttcctgaaaagcgcggtggccaaaggagcagtgtgcctggatgggagcgccccggtgtaccacttctcccccggctccggcaccggcgccaacaactggattgttcacatggagggaggagggtggtgcaagacccctgaggagtgtgtgatccggaagggcaacttcaggggctcctccaagttcatgaagccactctccttctcagggatcctagggggcaaccagcagttcaatcccgatttctataactggaacagagtcaaggtcaggtactgcgacggctcatcgtttaccggcgatgtcgaagaagtggactctaagacgaacctgcacttcagaggggccagagtttgggacgccatcatcgaagatctgcttaacaaggggatgagcaaagcaaagagtgctattctttctggatgctcagccggaggtctatcggcagtactgcattgtgacaaattcaaagacctccttccaccgtcggcattcgtaaaatgcgtttctgatgccggttattttattgatgggacggatattaccggcaacaagtttgtcagaacatcctttaagagcgttgtaaccctacatggatcggttaaaaatttgccatcttcatgtacctcgagggtatcacctgagctgtgcttcttcccacagcatgtcctcccaacaatgaaaacgccgctattcatacttaatgcggcgtatgattcatggcagatcaggaacatcctggtgcctagcgccgccgataagaagaaggaatgggccaaatgcaaggctgacataaagggctgctcctccagccagctagtgaccttacaacatttcagggatgagttcctgtcagcgctccctaaaccggagcagtctcccaagataggcatgttcatagactcgtgctttgctcactgccaatctggagcccaggactcgtggaatgccgacggttccccttcgattcagaagatgagaattggcaaagctgtgggggactggtacttcgaccgggctgtgtctcagcgggttgactgcccgtatccctgcaaccagtcctgcattgacaatgaagatgactga

SEQ ID NO: 440 - protein, 393 aa, Triticum aestivum
MAFGLPRAAAAVVTLVLGLAAASAVADDVEMVFLKSAVAKGAVCLDGSAPVYHFSPGSGTGANNWIVHMEGGGWCKTPEECVIRKGNFRGSSKFMKPLSFSGILGGNQQFNPDFYNWNRVKVRYCDGSSFTGDVEEVDSKTNLHFRGARVWDAIIEDLLNKGMSKAKSAILSGCSAGGLSAVLHCDKFKDLLPPSAFVKCVSDAGYFIDGTDITGNKFVRTSFKSVVTLHGSVKNLPSSCTSRVSPELCFFPQHVLPTMKTPLFILNAAYDSWQIRNILVPSAADKKKEWAKCKADIKGCSSSQLVTLQHFRDEFLSALPKPEQSPKIGMFIDSCFAHCQSGAQDSWNADGSPSIQKMRIGKAVGDWYFDRAVSQRVDCPYPCNQSCIDNEDD

SEQ ID NO: 441 - DNA, 1308 bp, Triticum aestivum
atggccgccgccaccgagcagctcctcctcccccaggagcagccccgccgccgccgaccggtatgggggcttgccgtcgctgccctactgctggtgctgctgctcgccgccgccggccctctccgtcctaggctgttccgcacgccgccgccagcagagcgcgtcgcgctcaccctcctctccggagcgaaggagaagggcgcagtgtgcgtggacggaacaccgcccggttaccacctgcagaggggctccggcgacggcgccgaccgttggctcgtccatctagagggaggaggctggtgcagcacagtcaaggaatgttcggacagcagactgtccaccaaaggttcatccaacttcatgaaaccgattcggttcatgggtaatgggatcctcggcggcgatcagctacagaatcctgatttctataactggaaaaaagtctacgttcggtactgcgatggggcgtcgttttctggtgacgctgaagctcaagcacaggatggaaccacactatacttcagaggattgcgtatctatgaagcagttatcgacgaactcatggaaaaaggactcgccaatgctacacaggccctctttacaggctgttctgctggtgctctatccatgatgctgcattgcgatgattttcgtgcaagatttccgcaggaggtttcagttaaatgctttgcggatgctgggtttttccttgatgaaaaggatatatccggaaaaaggtccctttggtctctctacgacagagtcattcacctccagaatgttagaaaagtgttgcccaaggactgccttgccaacaaggagccaaccgagtgtttcttcccggcagagcttattaagagcatccgcacccccatgtttattctcaaccctagttatgattcatggcagatacgaaatgttcttgtacctgattcatctgctcctgacaagtcgtggttgagttgcaaggaaaatatccgaaactgcaattctacacaagttgaagtcctcgatggattgaggaataagatggtcaatgacttgaaggtcgtcgaagacaaggaggactggggcatgttcatcgattcatgcttcacgcactgccaatcgctctccggcgtctcttggcattcgccaacctccccgaggcttgaaaataagaccattgcagaagctgttggagactggcactctggaaggagccaaggagcgaaagagattgactgcaagtatcagtgcaacccaacatgcaacagtttgccgcctccacgggatgtaactgcattcaaccgtgtcgagatctactaa

SEQ ID NO: 442 - protein, 435 aa, Triticum aestivum
MAAATEQLLLPQEQPRRRRPVWGLAVAALLLVLLLAAAGPLRPRLFRTPPPAERVALTLLSGAKEKGAVCVDGTPPGYHLQRGSGDGADRWLVHLEGGGWCSTVKECSDSRLSTKGSSNFMKPIRFMGNGILGGDQLQNPDFYNWKKVYVRYCDGASFSGDAEAQAQDGTTLYFRGLRIYEAVIDELMEKGLANATQALFTGCSAGALSMMLHCDDFRARFPQEVSVKCFADAGFFLDEKDISGKRSLWSLYDRVIHLQNVRKVLPKDCLANKEPTECFFPAELIKSIRTPMFILNPSYDSWQIRNVLVPDSSAPDKSWLSCKENIRNCNSTQVEVLDGLRNKMVNDLKVVEDKEDWGMFIDSCFTHCQSLSGVSWHSPTSPRLENKTIAEAVGDWHSGRSQGAKEIDCKYQCNPTCNSLPPPRDVTAFNRVEIY

SEQ ID NO: 443 - DNA, 1305 bp, Zea mays
atgccggtcctctgcacccaccacgttcagctccgcctctggtggcgccgtctcggccgacgcagcgccacattcgccctcgcgctcctcgccgtcgccctcgtgctcacgctctcccgctacgccgcaggccctgcgccctccccgcccccgtcctcgtcctacgggcatcgcctcccggccctcgtcgacatcaccctcgtctacggcgccatcgacaagggcgcagtgtgcttggatggtacgccgcctgcctaccacttccttcctggatttggggacggatcccacaactggctcctccacttggagggcggaagctggtgccgcaatttcgaatcatgtgctcgccgtaagaaaacaaatctcggttcctctgcccacatggatactcgtgctgaattcgtcggcatcctaagtgacgatcaatctcaaaatccagatttttacaactggaacaaagtgaaaataagatactgtgatggtgcatcattctctggaaatgtccaagaagaagtcaagaatgatacaggtttcttcttcagaggccagcgtatctgggaagcagtcatggccgaacttctgtctaaggggctagccagagcgaaacaggcttttttgactggatgctcggctggtggcctttctacatacattcattgtgatgatttccgggcacttctaccaaacacacctactgtcaagtgcctcgcggatggtggattctttcttgatgtagaagacatttctggaagaaggtatatgcggggcttttataacgatgttgctcggctgcaggatgtgcgtaaaatattccctcattgcagctcagatatggaaccggggcagtgcttcttcccacaagaagttgcaaaaagcatcaccaccccgatgtttatactcaatccagcatatgatgtttggcaggtagagcatgtgttgtctccagaaggttctgaccgtgaaaatctatggcaaaattgcaggatggatattagcaggtgtagctcaaaacagcttgaagttcttcaaggtttcaggaaagcgctgcttgatgctataaatgaattcaagaagagaagggactggggtatgttcattgactcctgctttatacactgtcagtcaatgaaagctttggcttggcattcgccatcagctgctagagtgaacaacaagacggccgcagaagcggtgggagattggttctttgagcggagggaggtgaaggaaatagattgtgaatatccctgcaacccgacatgctacaatgtggttctcgatcagccctacaaggaagattaa

SEQ ID NO: 444 - protein, 434 aa, Zea mays
MPVLCTHHVQLRLWWRRLGRRSATFALALLAVALVLTLSRYAAGPAPSPPPSSSYGHRLPALVDITLVYGAIDKGAVCLDGTPPAYHFLPGFGDGSHNWLLHLEGGSWCRNFESCARRKKTNLGSSAHMDTRAEFVGILSDDQSQNPDFYNWNKVKIRYCDGASFSGNVQEEVKNDTGFFFRGQRIWEAVMAELLSKGLARAKQAFLTGCSAGGLSTYIHCDDFRALLPNTPTVKCLADGGFFLDVEDISGRRYMRGFYNDVARLQDVRKIFPHCSSDMEPGQCFFPQEVAKSITTPMFILNPAYDVWQVEHVLSPEGSDRENLWQNCRMDISRCSSKQLEVLQGFRKALLDAINEFKKRRDWGMFIDSCFIHCQSMKALAWHSPSAARVNNKTAAEAVGDWFFERREVKEIDCEYPCNPTCYNVVLDQPYKED

SEQ ID NO: 445 - DNA, 1260 bp, Zea mays
atggccagcgagctgctgtcgccgctcatcccgcaccagcagcgtcgacgcgctctcgccgtcgacgtggccgcgcccctgctcgcgctcctcctggccgctgtcgccttctcccgctcaccggtggcggcactggtcagctcttcgaggctcgttgacctgacactcctcgccggcgctcgggggaagggagcggtgtgcttggatgggaccccgcctggttaccaccttcggagaggattcggttccggagctcacaactggctcgtcttccttgagggaggaggttggtgcaacaccacgcagagctgctccgagcgcaaaatgaccaacttcggttcatctaagtatatgggagcagtaaacttcactgggatactcagcaatgatcacacagaaaatcctgatttctacaactggaatacagttgtcataaggtactgcgacggagcatcatttgctggggatgcagagggagaagatctggatggaaccaaacttttcttcagaggattgcgtatctgggaagcagttgtagatgaactcatgggaaaaggaatggacgctgctaaacaagccttgcttacaggctgttctgctggttctctagctgcgctactgcactgtgataatttccatggacggtttcctcatgaagtttcagttaaatgcctttctgatgctggattttttattgacgagaaggatttatctggagaaagatccatgcggtcgctcatcagtggagtagttcaccttcagaatgttaaagaagttttacccaatgactgcctccaaaagaaggatccaacagagtgtttctttcctgctgaactgattaagggcatcaccacccccacgtttattctgaactccgattacgattcttggcagatacgaaacattctcgcaccaaatggatcctatcctggccaggaatggtctagttgcaaagcagatatccggaactgcagttgcgcacaaattgatgtactgcatggattcaagaagaaattagtcagtgaattgaaggttgccgaagataacaaggactggggcctgttcattgattcatgctttacccactgtcaaacaccattcgatatcacatggaattcaccgatctcaccaaggctcggcaacaagtctatttcagaggccgttggggattggtatttcgatagaaggcaaaacgcgaaacagattgactgcgagtacccatgcaaccccacatgcagcagttttttgcctactgcttga

SEQ ID NO: 446 - protein, 419 aa, Zea mays
MASELLSPLIPHQQRRRALAVDVAAPLLALLLAAVAFSRSPVAALVSSSRLVDLTLLAGARGKGAVCLDGTPPGYHLRRGFGSGAHNWLVFLEGGGWCNTTQSCSERKMTNFGSSKYMGAVNFTGILSNDHTENPDFYNWNTVVIRYCDGASFAGDAEGEDLDGTKLFFRGLRIWEAVVDELMGKGMDAAKQALLTGCSAGSLAALLHCDNFHGRFPHEVSVKCLSDAGFFIDEKDLSGERSMRSLISGVVHLQNVKEVLPNDCLQKKDPTECFFPAELIKGITTPTFILNSDYDSWQIRNILAPNGSYPGQEWSSCKADIRNCSCAQIDVLHGFKKKLVSELKVAEDNKDWGLFIDSCFTHCQTPFDITWNSPISPRLGNKSISEAVGDWYFDRRQNAKQIDCEYPCNPTCSSFLPTA

SEQ ID NO: 447 - DNA, 1194 bp, Zea mays
atggcggcgtccggggcatggctggcccgtgcgacggcgacggcggtgctgggtttcgtcctggcggtggcgtcagctgaggcggcatcgggggacgtggagatggtgttcctcaaggccgcggtggccaaaggcgcagtgtgcttggacggcagcccaccggtgtaccacttctctcccggctccggttctggcgccaataactgggtcgtccacatggagggaggagggtggtgcaggaatcctgatgagtgtgcggtccgcaagggcaacttcaggggctcctccaaatttatgaagccactctcgttttcagggatattaggcggcaaccaaaaatccaatcctgatttctacaactggaatagagtaaagatcagatactgtgatggctcatcatttactggtgacgttgaggctgtggacactgtgaaagatctccgttacagagggttcagagtctggcgtgccgtcatcgatgatctacttactgtgaggggaatgagcaaggcgcaaaatgctcttctttctggatgctcagccggaggtctagcagcaatactacactgtgacagattccatgatctgtttccagcgaaaacaaaggtcaagtgtttttctgatgctggatattttttcgatgggaaggatatctccgggaacttttacgctaggtcaatctataagagcgttgtgaatctacatggatcagccaaaaatttaccagcttcatgtacctcaaagccaaagcaatcacctgagctgtgtatgttcccacagtatgttgtcccgacaatgcgcacaccattgttcatacttaatgcagcctacgattcgtggcaggtcaagaacgtcctagcacctagtccagctgatccgaagaagacttgggcccaatgcaagcttgacatcaagagctgctccgccagccaactcacaaccttgcaaaatttcaggacagattttctggcagcactccctaaaacgcagtctgtaggcatgttcatcgactcatgcaatgctcactgccaatcaggatctcaagacacgtggctagccgatggttctcccacggttaacaagacgcaaattggcaaggcggtgggggactggtactacgatagggaggtccctcggcagattgattgcccgtatccctgcaacccaacttgcaagaaccgtgatgatgattga

SEQ ID NO: 448 - protein, 397 aa, Zea mays
MAASGAWLARATATAVLGFVLAVASAEAASGDVEMVFLKAAVAKGAVCLDGSPPVYHFSPGSGSGANNWVVHMEGGGWCRNPDECAVRKGNFRGSSKFMKPLSFSGILGGNQKSNPDFYNWNRVKIRYCDGSSFTGDVEAVDTVKDLRYRGFRVWRAVIDDLLTVRGMSKAQNALLSGCSAGGLAAILHCDRFHDLFPAKTKVKCFSDAGYFFDGKDISGNFYARSIYKSVVNLHGSAKNLPASCTSKPKQSPELCMFPQYVVPTMRTPLFILNAAYDSWQVKNVLAPSPADPKKTWAQCKLDIKSCSASQLTTLQNFRTDFLAALPKTQSVGMFIDSCNAHCQSGSQDTWLADGSPTVNKTQIGKAVGDWYYDREVPRQIDCPYPCNPTCKNRDDD

SEQ ID NO: 449 - DNA, 1260 bp, Zea mays
atggccagcgagctgctgtcgccgctcatcccgcaccagcagcgtcgacgcgctctcgccgtcgacgtggccgcgcccctgctcgcgctcctcctggccgctgtcgccttctcccgctcaccggtggcggcactggtcagctcttcgaggctcgttgacctgacactcctcgccggcgctcgggggaagggagcggtgtgcttggatgggaccccgcctggttaccaccttcggagaggattcggttccggagctcacaactggctcgtcttccttgagggaggaggttggtgcaacaccacgcagagctgctccgagcgcaaaatgaccaacttcggttcatctaagtatatgggagcagtaaacttcactgggatactcagcaatgatcacacagaaaatcctgatttctacaactggaatacagttgtcataaggtactgcgacggagcatcatttgctggggatgcagagggagaagatctggatggaaccaaacttttcttcagaggattgcgtatctgggaagcagttgtagatgaactcatgggaaaaggaatggacgctgctaaacaagccttgcttacaggctgttctgctggttctctagctgcgctactgcactgtgataatttccatggacggtttcctcatgaagtttcagttaaatgcctttctgatgctggattttttattgacgagaaggatttatctggagaaagatccatgcggtcgctcatcagtggagtagttcaccttcagaatgttaaagaagttttacccaatgactgcctccaaaagaaggatccaacagagtgtttctttcctgctgaactgattaagggcatcaccacccccacgtttattctgaactccgattacgattcttggcagatacgaaacattctcgcaccaaatggatcctatcctggccaggaatggtctagttgcaaagcagatatccggaactgcagttgcgcacaaattgatgtactgcatggattcaagaagaaattagtcagtgaattgaaggttgccgaagataacaaggactggggcctgttcattgattcatgctttacccactgtcaaacaccattcgatatcacatggaattcaccgatctcaccaaggctcggcaacaagtctatctcagaggccgttggggattggtatttcgatagaaggcaaaacgcgaaacagattgactgcgagtacccatgcaaccccacatgcagcagtcttctgcctactgcttga

SEQ ID NO: 450 - protein, 419 aa, Zea mays
MASELLSPLIPHQQRRRALAVDVAAPLLALLLAAVAFSRSPVAALVSSSRLVDLTLLAGARGKGAVCLDGTPPGYHLRRGFGSGAHNWLVFLEGGGWCNTTQSCSERKMTNFGSSKYMGAVNFTGILSNDHTENPDFYNWNTVVIRYCDGASFAGDAEGEDLDGTKLFFRGLRIWEAVVDELMGKGMDAAKQALLTGCSAGSLAALLHCDNFHGRFPHEVSVKCLSDAGFFIDEKDLSGERSMRSLISGVVHLQNVKEVLPNDCLQKKDPTECFFPAELIKGITTPTFILNSDYDSWQIRNILAPNGSYPGQEWSSCKADIRNCSCAQIDVLHGFKKKLVSELKVAEDNKDWGLFIDSCFTHCQTPFDITWNSPISPRLGNKSISEAVGDWYFDRRQNAKQIDCEYPCNPTCSSLLPTA

SEQ ID NO: 451 - DNA, 1305 bp, Zea mays
atgccggtcctctgcacccaccacgttcagctccgcctctggtggcgccgtctcggccgacgcagcgccacattcgccctcgcgctcctcgccgtcgccctcgtgctcacgctctcccgctacgccgcaggccctgcgccctccccgcccccgtcctcgtcctacgggcatcgcctcccggccctcgtcgacatcaccctcgtctacggcgccatcgacaagggcgcagtgtgcttggatggtacgccgcctgcctaccacttccttcctggatttggggacggatcccacaactggctcctccacttggagggcggaagctggtgccgcaatttcgaatcatgtgctcgccgtaagaaaacaaatctcggttcctctgcccacatggatactcgtgctgaattcgtcggcatcctaagtgacgatcaatctcaaaatccagatttttacaactggaacaaagtgaaaataagatactgtgatggtgcatcattctctggaaatgtccaagaagaagtcaagaatgatacaggtttcttcttcagaggccagcgtatctgggaagcagtcatggccgaacttctgtctaaggggctagccagagcgaaacaggcttttttgactggatgctcggctggtggcctttctacatacattcattgtgatgatttccgggcacttctaccaaacacacctactgtcaagtgcctcgcggatggtggattctttcttgatgtagaagacatttctggaagaaggtatatgcggggcttttataacgatgttgctcggctgcaggatgtgcgtaaaatattccctcattgcagctcagatatggaaccggggcagtgcttcttcccacaagaagttgcaaaaagcatcaccaccccgatgtttatactcaatccagcatatgatgtttggcaggtagagcatgtgttgtctccagaaggttctgaccgtgaaaatttatggcaaaattgcaggatggatattagcaggtgtagctcaaaacagcttgaagttcttcaaggtttcaggaaagcgctgcttgatgctataaatgaattcaagaagagaagggactggggtatgttcattgactcctgctttatacactgtcagtcaatgaaagctttggcttggcattcgccatcagctgctagagtgaacaacaagacggccgcagaagcggtgggagattggttctttgagcggagggaggtgaaggaaatagattgtgaatatccctgcaacccgccatgctacaatgtggttctcgatcagccctccaaggaagattaa

SEQ ID NO: 452 - protein, 434 aa, Zea mays
MPVLCTHHVQLRLWWRRLGRRSATFALALLAVALVLTLSRYAAGPAPSPPPSSSYGHRLPALVDITLVYGAIDKGAVCLDGTPPAYHFLPGFGDGSHNWLLHLEGGSWCRNFESCARRKKTNLGSSAHMDTRAEFVGILSDDQSQNPDFYNWNKVKIRYCDGASFSGNVQEEVKNDTGFFFRGQRIWEAVMAELLSKGLARAKQAFLTGCSAGGLSTYIHCDDFRALLPNTPTVKCLADGGFFLDVEDISGRRYMRGFYNDVARLQDVRKIFPHCSSDMEPGQCFFPQEVAKSITTPMFILNPAYDVWQVEHVLSPEGSDRENLWQNCRMDISRCSSKQLEVLQGFRKALLDAINEFKKRRDWGMFIDSCFIHCQSMKALAWHSPSAARVNNKTAAEAVGDWFFERREVKEIDCEYPCNPPCYNVVLDQPSKED

SEQ ID NO: 453 - DNA, 52 bp, Artificial sequence
  primer: prm00309
ggggacaagtttgtacaaaaaagcaggcttcacaatggataaacaaccggcg

SEQ ID NO: 454 - DNA, 47 bp, Artificial sequence
  primer: prm00310
ggggaccactttgtacaagaaagctgggtccaaggtcaggggaattc

SEQ ID NO: 455 - protein, 14 aa, Artificial sequence
  motif 1
  VARIANT (4)..(4): Xaa can be Phe, His or Tyr
  UNSURE (5)..(5): Xaa can be any naturally occurring amino acid
  VARIANT (8)..(8): Xaa can be Lys or Arg
  VARIANT (9)..(9): Xaa can be Ile or Val
  VARIANT (11)..(11): Xaa can be Gly, Ile, Leu or Val
PDFXXWNXXKXRYC

SEQ ID NO: 456 - protein, 20 aa, Artificial sequence
  motif 2
  VARIANT (2)..(2): Xaa can be Phe or Val
  VARIANT (7)..(7): Xaa can be Ser or Thr
  VARIANT (8)..(8): Xaa can be Ala, Leu, Pro or Val
  VARIANT (10)..(10): Xaa can be Ala, Gly or Val
  UNSURE (13)..(15): Xaa can be any naturally occurring amino acid
  UNSURE (17)..(17): Xaa can be any naturally occurring amino acid
  VARIANT (19)..(19): Xaa can be Ala, Asp, Glu, Ser or Thr
AXCLDGXXPXYHXXXGXGXG

SEQ ID NO: 457 - protein, 24 aa, Artificial sequence
  motif 3
  UNSURE (4)..(5): Xaa can be any naturally occurring amino acid
  VARIANT (6)..(6): Xaa can be Ala, Ile, Leu or Val
  UNSURE (7)..(8): Xaa can be any naturally occurring amino acid
  VARIANT (9)..(9): Xaa can be Ile, Leu, Met or Val
  UNSURE (10)..(10): Xaa can be any naturally occurring amino acid
  UNSURE (13)..(13): Xaa can be any naturally occurring amino acid
  VARIANT (15)..(15): Xaa can be Phe, Ile, Leu or Val
  VARIANT (16)..(16): Xaa can be Ile, Leu or Val
  VARIANT (18)..(18): Xaa can be Ala, Gly, Pro, Ser or Thr
  VARIANT (19)..(19): Xaa can be Ala, Gly or Pro
  UNSURE (20)..(20): Xaa can be any naturally occurring amino acid
  UNSURE (22)..(23): Xaa can be any naturally occurring amino acid
FPQXXXXXXXTPXFXXNXXXDXXQ

SEQ ID NO: 458 - protein, 20 aa, Artificial sequence
  motif 4
  VARIANT (2)..(2): Xaa can be Ile, Leu or Val
  VARIANT (3)..(3): Xaa can be Ile, Leu or Val
  UNSURE (4)..(4): Xaa can be any naturally occurring amino acid
  VARIANT (5)..(5): Xaa can be Phe, Ile, Leu or Met
  UNSURE (12)..(12): Xaa can be any naturally occurring amino acid
  VARIANT (13)..(13): Xaa can be Asp, Asn, Ser or Thr
  UNSURE (14)..(15): Xaa can be any naturally occurring amino acid
  VARIANT (16)..(16): Xaa can be Ala, Asp, Glu, Asn, Ser or Thr
  UNSURE (18)..(19): Xaa can be any naturally occurring amino acid
  VARIANT (20)..(20): Xaa can be Arg or Ser
WXXXXEGGGWCXXXXXCXXX

SEQ ID NO: 459 - protein, 15 aa, Artificial sequence
  motif 5
  VARIANT (4)..(4): Xaa can be Phe, Leu, Met or Val
  VARIANT (5)..(5): Xaa can be Ala, Pro or Ser
  UNSURE (9)..(9): Xaa can be any naturally occurring amino acid
  VARIANT (11)..(11): Xaa can be Phe, Ile, Leu, Met or Val
  UNSURE (12)..(14): Xaa can be any naturally occurring amino acid
  VARIANT (15)..(15): Xaa can be Ala, Asp, Ser or Val
VKCXXDAGXFXXXXX

SEQ ID NO: 460 - protein, 13 aa, Artificial sequence
  motif 6
  UNSURE (3)..(3): Xaa can be any naturally occurring amino acid
  VARIANT (4)..(4): Xaa can be Lys of Arg
  VARIANT (5)..(5): Xaa can be Ile or Val
  VARIANT (6)..(6): Xaa can be Phe, Trp or Tyr
  UNSURE (7)..(7): Xaa can be any naturally occurring amino acid
  VARIANT (9)..(9): Xaa can be Ala, Gly, Ile or Val
  UNSURE (10)..(12): Xaa can be any naturally occurring amino acid
RGXXXXXAXXXXL

SEQ ID NO: 461 - protein, 8 aa, Artificial sequence
  motif 7 A
  VARIANT (3)..(3): Xaa can be Ala, Gly or Ser
  VARIANT (6)..(6): Xaa can be Ala, Asp, Gly, Ser or Thr
DGXSFXGD

SEQ ID NO: 462 - protein, 9 aa, Artificial sequence
  motif 7 B
  VARIANT (3)..(3): Xaa can be Ala, Gly or Ser
  VARIANT (6)..(6): Xaa can be Ala, Asp, Gly, Ser or Thr
  UNSURE (8)..(8): Xaa can be any naturally occurring amino acid
DGXSFXGXD

SEQ ID NO: 463 - protein, 10 aa, Artificial sequence
  motif 7 C
  VARIANT (3)..(3): Xaa can be Ala, Gly or Ser
  VARIANT (6)..(6): Xaa can be Ala, Asp, Gly, Ser or Thr
  UNSURE (8)..(9): Xaa can be any naturally occurring amino acid
DGXSFXGXXD

SEQ ID NO: 464 - protein, 11 aa, Artificial sequence
  motif 7 D
  VARIANT (3)..(3): Xaa can be Ala, Gly or Ser
  VARIANT (6)..(6): Xaa can be Ala, Asp, Gly, Ser or Thr
  UNSURE (8)..(10): Xaa can be any naturally occurring amino acid
DGXSFXGXXXD

SEQ ID NO: 465 - protein, 5 aa, Artificial sequence
  GxSxG motif
  UNSURE (2)..(2): Xaa can be any naturally occurring amino acid
  UNSURE (4)..(4): Xaa can be any naturally occurring amino acid
GXSXG

SEQ ID NO: 466 - DNA, 1743 bp, Oryza sativa
gctcctccattcttccctcctcctcttccccttcttccagatccattcctcaggaagaaggcagaggctgggagtgggaggaaggcccaagaaccagcaaagaaagaagagaaccatcaaccatgggttgttcttgggctcttgctgctctggttcttggcttcttggtggtggcagtccatggctctgagccgtggctgaatcagacgcaggtctactccaccaatgccaactctggtagcaatggcgtcttcgtcgggattacgctcatccagtcggcggccgccaagggagccgtatgcttggatgggagcttaccagggtatcacctacaccgagggtttggatcaggggcaaacagttggcttgtcaatttggagggtggaggctggtgcaacgatgttaaaagctgcgtgtttcgcaagagcagtcggcgtggttcatcaaatcacatggagagccaactccagtttactgggataatgagtaacaggcctgaagaaaatcctgatttctacaactggaacagagtgaaggttcgatattgtgatggcggatccttcactggtgatggggctgatgcgtctgcaggcctttatttccgaggtcagcgtatttggcaggctgctatggatgatctgatggcccaaggaatgagatatgctaaccaggcacttctttctggatgctctgctggtggtgtttcaaccatacttcactgtgacgagttccgtggattgtttagcggcagtacaaacgtgaagtgccttgctgatgctggaatgtttctggactttgttgatgtttctgggcaacgagaaatgagggacttcttcaatggtattgtgagattgcagggttccggaagaagcctgcctaggtcttgtacctcccgcatggataaaacttcgtgctttttcccccagaatgtggtgccaaacattcaaactccaacttttattttgaacactgcttatgatgtgtggcagcttcaacaaagtgtggcccccaaaagggctgatccgcaaggtctatggcgaggatgtaggatgaatcatgcctcctgtaatagcaaccaactgcaatttttacaaggtttcaggaatcaaatgctcgatgcggtgaggggtttctccggcgcaaggcagaacggtctttttatcaactcctgtttcgcacattgccaaagtgagagacaggacacatggtacgcaggggattctcctcgtctcggtaacaagagaattgctgaagcagtaggcgactggtttttcgatagggcagacgcgaagtacacagactgtgcatacccttgtgatggtacctgccatcatcttacattcaggggagattactaagattcattcttagaccaccaccaaatgtaggtggcaaaaagaggggaaaaaagggacacccaatgggaatatatacagaataagaggaaggtatagatagaggatgcaaagctagtgacttgcatggacatgttcatcattactcagatatgatcttagggcagggcctggtgtgcttgctaatgtggcatgatcaggcctctgcatttagctccacacaccgattgattcttttccattgcctgaattccctggatgatgtatctctgaacatttggaccccaatggtgtatctgtatcataaatttacatatccatgtactaaacgtgataatatgaatgaaataagtaatgtgcctgcaagaaacccaatcatttgtcaggc

SEQ ID NO: 467 - protein, 411 aa, Oryza sativa; identical to SEQ ID NO: 84

SEQ ID NO: 468 - DNA, 1465 bp, Oryza sativa
tcgggccccaaataatgattttattttgactgatagtgacctgttcgttgcaacaaattgatgagcaatgcttttttataatgccaactttgtacaaaaaagcaggcttaaacaatgggttgttcttgggctcttgctgctctggttcttggcttcttggtggtggcagtccatggctctgagccgtggctgaatcagacgcaggtctactccaccaatgccaactctggtagcaatggcgtcttcgtcgggattacgctcatccagtcggcggccgccaagggagccgtatgcttggatgggagcttaccagggtatcacctacaccgagggtttggatcaggggcaaacagttggcttgtcaatttggagggtggaggctggtgcaacgatgttaaaagctgcgtgtttcgcaagagcagtcggcgtggttcatcaaatcacatggagagccaactccagtttactgggataatgagtaacaggcctgaagaaaatcctgatttctacaactggaacagagtgaaggttcgatattgtgatggcggatccttcactggtgatggggctgatgcgtctgcaggcctttatttccgaggtcagcgtatttggcaggctgctatggatgatctgatggcccaaggaatgagatatgctaaccaggcacttctttctggatgctctgctggtggtgtttcaaccatacttcactgtgacgagttccgtggattgtttagcggcagtacaaacgtgaagtgccttgctgatgctggaatgtttctggactttgttgatgtttctgggcaacgagaaatgagggacttcttcaatggtattgtgagattgcagggttccggaagaagcctgcctaggtcttgtacctcccgcatggataaaacttcgtgctttttcccccagaatgtggtgccaaacattcaaactccaacttttattttgaacactgcttatgatgtgtggcagcttcaacaaagtgtggcccccaaaagggctgatccgcaaggtctatggcgaggatgtaggatgaatcatgcctcctgtaatagcaaccaactgcaatttttacaaggtttcaggatcaaatgctcgatgcggtgaggggtttctccggcgcaaggcagaacggtctttttatcaactcctgtttcgcacattgccaaagtgagagacaggacacatggtacgcaggggattctcctcgtctcggtaacaagagaattgctgaagcagtaggcgactggtttttcgatagggcagacgcgaagtacacagactgtgcatacccttgtgatggtacctgccatcatcttacattcaggggagattactaagattcattctacccagctttcttgtacaaagttggcattataagaaagcattgcttatcaatttgttgcaacgaacaggtcactatcagtcaaaataaaatcattatttgccatcc

SEQ ID NO: 469 - DNA, 2194 bp, Oryza sativa
aatccgaaaagtttctgcaccgttttcaccccctaactaacaatatagggaacgtgtgctaaatataaaatgagaccttatatatgtagcgctgataactagaactatgcaagaaaaactcatccacctactttagtggcaatcgggctaaataaaaaagagtcgctacactagtttcgttttccttagtaattaagtgggaaaatgaaatcattattgcttagaatatacgttcacatctctgtcatgaagttaaattattcgaggtagccataattgtcatcaaactcttcttgaataaaaaaatctttctagctgaactcaatgggtaaagagagagattttttttaaaaaaatagaatgaagatattctgaacgtattggcaaagatttaaacatataattatataattttatagtttgtgcattcgtcatatcgcacatcattaaggacatgtcttactccatcccaatttttatttagtaattaaagacaattgacttatttttattatttatcttttttcgattagatgcaaggtacttacgcacacactttgtgctcatgtgcatgtgtgagtgcacctcctcaatacacgttcaactagcaacacatctctaatatcactcgcctatttaatacatttaggtagcaatatctgaattcaagcactccaccatcaccagaccacttttaataatatctaaaatacaaaaaataattttacagaatagcatgaaaagtatgaaacgaactatttaggtttttcacatacaaaaaaaaaaagaattttgctcgtgcgcgagcgccaatctcccatattgggcacacaggcaacaacagagtggctgcccacagaacaacccacaaaaaacgatgatctaacggaggacagcaagtccgcaacaaccttttaacagcaggctttgcggccaggagagaggaggagaggcaaagaaaaccaagcatcctccttctcccatctataaattcctccccccttttcccctctctatataggaggcatccaagccaagaagagggagagcaccaaggacacgcgactagcagaagccgagcgaccgccttctcgatccatatcttccggtcgagttcttggtcgatctcttccctcctccacctcctcctcacagggtatgtgcctcccttcggttgttcttggatttattgttctaggttgtgtagtacgggcgttgatgttaggaaaggggatctgtatctgtgatgattcctgttcttggatttgggatagaggggttcttgatgttgcatgttatcggttcggtttgattagtagtatggttttcaatcgtctggagagctctatggaaatgaaatggtttagggatcggaatcttgcgattttgtgagtaccttttgtttgaggtaaaatcagagcaccggtgattttgcttggtgtaataaagtacggttgtttggtcctcgattctggtagtgatgcttctcgatttgacgaagctatcctttgtttattccctattgaacaaaaataatccaactttgaagacggtcccgttgatgagattgaatgattgattcttaagcctgtccaaaatttcgcagctggcttgtttagatacagtagtccccatcacgaaattcatggaaacagttataatcctcaggaacaggggattccctgttcttccgatttgctttagtcccagaattttttttcccaaatatcttaaaaagtcactttctggttcagttcaatgaattgattgctacaaataatgcttttatagcgttatcctagctgtagttcagttaataggtaatacccctatagtttagtcaggagaagaacttatccgatttctgatctccatttttaattatatgaaatgaactgtagcataagcagtattcatttggattattttttttattagctctcaccccttcattattctgagctgaaagtctggcatgaactgtcctcaattttgttttcaaattcacatcgattatctatgcattatcctcttgtatctacctgtagaagtttctttttggttattccttgactgcttgattacagaaagaaatttatgaagctgtaatcgggatagttatactgcttgttcttatgattcatttcctttgtgcagttcttggtgtagcttgccactttcaccagcaaagttc

1-41. (canceled)

42. A method for enhancing one or more yield-related traits in a plant relative to a control plant, comprising modulating expression in a plant of a nucleic acid encoding a pectin acetylesterase (PAE1) polypeptide, wherein said PAE1 polypeptide comprises one or more motifs having at least 50% or more sequence identity to any one or more of the motifs 1 to 7D as provided in SEQ ID NO: 455 to SEQ ID NO: 464.

43. The method of claim 42, wherein said modulated expression is effected by introducing and expressing in a plant a nucleic acid encoding said PAE1 polypeptide.

44. The method of claim 42, wherein said one or more enhanced yield-related traits comprise increased yield, increased early vigour, increased biomass, and/or increased seed yield relative to a control plant.

45. The method of claim 42, wherein said one or more enhanced yield-related traits are obtained under non-stress conditions.

46. The method of claim 42, wherein said one or more enhanced yield-related traits are obtained under conditions of drought stress, salt stress or nitrogen deficiency.

47. The method of claim 42, wherein said PAE1 polypeptide comprises:
a) all of the following motifs:
i) Motif 1 of SEQ ID NO: 455;
ii) Motif 2 of SEQ ID NO: 456;
iii) Motif 3 of SEQ ID NO: 457;
iv) Motif 4 of SEQ ID NO: 458;
v) Motif 5 of SEQ ID NO: 459;
vi) Motif 6 of SEQ ID NO: 460;
vii) Motif 7 selected from the group consisting of Motif 7A of SEQ ID NO: 461, Motif 7B of SEQ ID NO: 462, Motif 7C of SEQ ID NO: 463, and Motif 7D) of SEQ ID NO: 464;
b) any 7, 6, 5, 4, 3 or 2 of the motifs 1 to 7 as defined under a); or
c) Motif 1, Motif 2, Motif 3, Motif 4, Motif 5, Motif 6, Motif 7A, Motif 7B, Motif 7C, or Motif 7D as defined under a).

48. The method of claim 42, wherein said nucleic acid is of plant origin, from a dicotyledonous plant, from a plant of the family Poaceae, from a plant of the genus Oryza, or from an Oryza saliva plant.

49. The method of claim 42, wherein:
a) said nucleic acid encodes any one of the polypeptides listed in Table A or is a portion of such a nucleic acid, or a nucleic acid capable of hybridizing with such a nucleic acid; or
b) said nucleic acid encodes an orthologue or paralogue of any one of the polypeptides given in Table A.

50. The method of claim 42, wherein said nucleic acid encodes a polypeptide selected from the group consisting of:
a) a polypeptide comprising the amino acid sequence of SEQ ID NO: 2 or SEQ ID NO: 467;
b) a polypeptide encoded by a nucleic acid comprising the nucleotide sequence of SEQ ID NO: 1, SEQ ID NO: 466, or SEQ ID NO: 468;
c) a polypeptide having at least 25% sequence identity to the amino acid sequence of SEQ ID NO: 2 or SEQ ID NO: 467; and
d) a polypeptide encoded by a nucleic acid capable of hybridizing with a nucleic acid comprising the nucleotide sequence of SEQ ID NO: 1, SEQ ID NO: 466, or SEQ ID NO: 468 under stringent hybridization conditions.

51. The method of claim 42, wherein said nucleic acid is operably linked to a constitutive promoter of plant origin, a medium strength constitutive promoter of plant origin, a GOS2 promoter, or a GOS2 promoter from rice.

52. A plant, or part thereof: or plant cell, obtainable by the method according to claim 42, wherein said plant, plant part or plant cell comprises a recombinant nucleic acid encoding a PAE1 polypeptide as defined in claim 42.

53. A construct comprising:
(i) the nucleic acid encoding pectin acetylesterase (PAE1) polypeptide as defined in claim 42, wherein said PAE1 polypeptide comprises one or more motifs having at least 50% or more sequence identity to any one or more of the motifs 1 to 7D as provided in SEQ ID NO: 455 to SEQ ID NO: 464;
(ii) one or more control sequences capable of driving expression of the nucleic acid sequence of (i); and optionally
(iii) a transcription termination sequence.

54. The construct according to claim 53, wherein one of said control sequences is a constitutive promoter of plant origin.

55. The construct according to claim 53, wherein one of said control sequences is a GOS2 promoter from rice.

56. A host cell comprising the construct according to claim 53.

57. A method for making plants having one or more enhanced yield-related traits which comprises utilizing the construct according to claim 53 in a plant.

58. A plant, plant part or plant cell transformed with the construct according to claim 53.

59. A method for the production of a transgenic plant having one or more enhanced yield-related traits relative to control plants comprising:
(i) introducing and expressing in a plant cell or plant a nucleic acid encoding an pectin acetylesterase (PAE1) polypeptide as defined in claim 42, wherein said PAE1 polypeptide comprises one or more motifs having at least 50% or more sequence identity to any one or more of the motifs 1 to 7D as provided in SEQ ID NO: 455 to SEQ ID NO: 464; and
(ii) cultivating said plant cell or plant under conditions promoting plant growth and development, particularly of plants having one or more enhanced yield-related traits relative to control plants.

60. A transgenic plant having one or more enhanced yield-related traits relative to control plants resulting from modulated expression of a nucleic acid encoding (PAE1) polypeptide, wherein said PAE1 polypeptide comprises one or more motifs having at least 50% or more sequence identity to any one or more of the motifs 1 to 7D as provided in SEQ ID NO: 455 to SEQ ID NO: 464; or a transgenic plant cell derived from said transgenic plant.

61. The transgenic plant according to claim 60, or a transgenic plant cell derived therefrom, wherein said plant is a crop plant, a monocotyledonous plant or a cereal.

62. A harvestable part of the plant according to claim 61, wherein said harvestable parts are shoot biomass and/or root biomass and/or seeds.

63. A product derived from the plant according to claim 61.

64. A recombinant chromosomal DNA comprising the construct according to claim 53.

65. A plant expression construct according to claim 53.

66. An isolated nucleic acid molecule selected from the group consisting of:
(i) a nucleic acid represented by SEQ ID NO: 1;
(ii) the complement of a nucleic acid represented by SEQ ID NO: 1;
(iii) a nucleic acid encoding a PAE1 polypeptide having in increasing order of preference at least 25% sequence identity to the amino acid sequence represented by SEQ ID NO: 2 and additionally or alternatively comprising one or more motifs having in increasing order of preference at least 50% or more sequence identity to any one or more of the motifs 1 to 7D as provided in SEQ ID NO: 455 to SEQ ID NO: 464, and further conferring one or more enhanced yield-related traits relative to control plants; and
(iv) a nucleic acid molecule which hybridizes with a nucleic acid molecule of (i) to (iii) under high stringency hybridization conditions and confers one or more enhanced yield-related traits relative to control plants.

67. An isolated polypeptide encoded by the isolated nucleotide according to claim 66.

68. An expression cassette comprising the isolated nucleic acid molecule according to claim 66 and a promoter which is operably linked to said isolated nucleic acid molecule, and, optionally, a transcription termination sequence.

69. The expression cassette according to claim 68, wherein said promoter is heterologous with respect to said nucleic acid molecule.

70. An expression vector comprising the expression cassette of claim 68.

71. A host cell comprising the isolated nucleic acid molecule of claim 66.

72. A host cell according to claim 71, wherein said host cell is an Agrobacterium cell or a plant cell.

73. A plant comprising the isolated nucleic acid molecule of claim 66.

74. A method for producing a transgenic seed, comprising the steps of (i) introducing into a plant the construct as defined in claim 53; (ii) selecting a transgenic plant having enhanced yield-related traits so produced by comparing said transgenic plant with a control plant; (iii) growing the transgenic plant to produce a transgenic seed, wherein the transgenic seed comprises the nucleic acid or the construct.

75. A method according to claim 74, wherein a progeny plant grown from the transgenic seed has increased expression of the polypeptide compared to the control plant.

76. The construct according to claim 53, comprised in a crop plant cell.

77. A composition comprising a recombinant chromosomal DNA comprising the construct according to claim 53 and/or the construct of claim 53, and a host cell.

78. A transgenic pollen grain comprising the construct according to claim 53.

79. A protective covering comprising
(i) propagules of the plants of claim 52, and/or
(ii) the plant cells of the claim 52, and/or
(iii) the nucleic acid encoding the polypeptides as defined in any of claim 42 and/or a pectin acetylesterase (PAE1) polypeptide, wherein said PAE1 polypeptide comprises one or more motifs having at least 50% or more sequence identity to any one or more of the motifs 1 to 7D as provided in SEQ ID NO: 455 to SEQ ID NO: 464 and/or a construct
comprising:
the nucleic acid encoding PAE1 polypeptide
one or more control sequences capable of driving expression of the nucleic acid sequence of (i); and
optionally a transcription termination sequence;
comprised in an agricultural product, and/or
(iv) the recombinant chromosomal DNA comprising a construct
comprising:
(i) the nucleic acid encoding the PAE1;
(ii) one or more control sequences capable of driving expression of the nucleic acid sequence of (i); and optionally
(iii) a transcription termination sequence.
